United States Patent Application Publication US 2026/0357256 A1 - sequence listing, part 16

SEQ ID NO: 9 - DNA, 58617616 bp, Homo sapiens (residues 32,565,346-34,736,368 of 58,617,616)
  source 1..58617616: mol_type = genomic DNA
aattgcagtctttgtcattacttttttttttttttttttttttttttgagatagagtctcattctgtcgcccaggctggagtgcaacagtgcgatctcggctcactgcaacctctgcctcccaggttcaagtgattctccttcctcagcctcctgagtagctggattacagacacctgtcaccacctctagctaaattttgtatttttagtacagacagggtttcgacatgttggccaggctggtcttgaactcctgacctcaagtgatccacccgtctcggcctcccaaagtgctggaattacaggcgtgagccaccgtgcccggcctttgtcattacttttgatggcaaaaactgcaattaattttgcaccaagcgaatacatgtcttgacatatcttcattaccagttgacctttggattttcactctaaaatgattctatcacaaagaaaatctttaagtttgtaatgaataatttaattgagctgggcatggtggctcacatctgtaatcctagcactttgggaggctgaggtggaaggattgcttgaggccaggagttcaagaccagcctgggcaacatagtgagggctcgtctccacaaaaaaattttaaaattagccagccatggtggcatgcacctgcagtcccagctactcgggaggctgaggtgggagaatcgactgagcccaagaattcaaggttacagtgagctatgatcgcaccactgccctccagtctgggtgacagagtaagactctgtctctaaaataataataataataataatttaattaatcttatattaattgagaatttgggtgatagtagtccattgtagcaaatacactattatttaaggagtaagggttaactttctcatgaatcaaaataattcagtacaaccccaggaagaaacagatctgtgtaaactgcagggaagacgattgagcccaggagggtacttagctcagtgccatcacacaggggaggtatagaccctctgacacagagttttgctgctctttatttccaaaatcagtcctggtcaaactgctccatgctccttgagcccagaaagtcacttgggctcccaaagacagccagggcactttagaatgccgtagcccacaggccagcccatggctatctgcatgcacccagagagcccacctagaaccactcaggaaaatgaacagtaagggcatggagacaaggcttagggttgtctaagaatcagagtgcagctttggaatacatgggaactgtctcatggctctggcgcggtttgcttactcattcccatgggaggattccagatggttagtgtgtgtatccccagcccacatggcctcccaggcgagggtcatttgctcaccacatataccacttttgctgtatccatataccatcctattctacccagaggatttttaccctcactgtgtgctggatccaattcctactggattgcaagaatcaattgttaaaatttcagaaaatgtgcaagctgtattttgttttgttttgttttgttttgttttaatttttgagacaaggtctcactctgtcacccacactggagtgcagtggcgcaacctcagctcactgcaacctccaccttctgggctctagttattctcctacctcagcctcctgagtagctgggactacaggtgcatgccaccatgcctagctaatgttttgtattttggtagagatggggttttgctatgttgctcaggctggtcttgagctcctgagctcaagcaatccacccgcctcagcctcccaaagtgctgggattacaggcatgagccatagcacctggcccataagctggtttttaaacgtagtcattattaaaaaaaaaaaaaagagagagcttataattaagtattgtgttaaaatatgaaggtactaaatacctaaagcatcattcctattttactgtgttctactcccacatttgctctgatgttacttacatctgttctgcccctatggtgggaatacaatataatgacgtgctactgtgcccaactcagctccctgttcagtgacctcacgtcggcaacctgaaattggccatggtggaagaatttacaccacagaaagcagcaaatgtgacaaatcagggtttcttttgttttgttttgtttgttccaagaaactttgttacgcatttcccaacgcactgccagatattggcatatcccttgtgggatatgtggagtgggatgaatagcagttagtctggtgaatagcaggagaccttcccagcagagtggatggtctgcacagacacttggaggtagcaaaaggcatgagccagggccagcctgagactgttaagaggacctgggtactgcccaggtgtcaaagaaaatgaggaccgagggcaggcgccatggtccgtacctataatcccaacactttgggaggtcgaggtgggaggatcgcttgaggccaggagttcgagaccagcctgggcaacaaagcgagacccccatctctacaaaagttaaaataggtcacagtggctcacacctgtaatcccagcactttaagaggctgaggtggaaggatcacttgaggccagaagttcaagacaagcctgggtaacacagcaagaccccatctctaaaaagtaaaaatatctcttgaatgaatgagtgagtgagtaatgttactagatgagaccaaagaatcgccttctcaggatgttttttgtttttttgtttgtttgttttggtttggtttggtttggtttttttgagatggagtctcggtctgtcacccacgctagagtgcagtggcacgatctcagctcactgcaacctctgcctcctgggttcacgccattctcctgcctcagccccccgagtatctgagactacaggcgcccgccaccatgcccggctaattttttgtatttttagtagaaacagggtttcaccatattagccaggatggtctcgatctcctgacctcatgatccgcccgcctcagcctcccaaagtgctgggattacaggcatgagccaccgcgcccggccaggatgtttttaaggacaggtgaaagtcctcctaattttatttgaggagaggaaggtcttcctcatctcctttgaggttggttctctttggatgaggcaggtggaggctacgatgaaatttcatcttggcccccaatcatacaggacccctgtcggcatcaagttccccagaattaagacccagaactgagagttatcccaaggcccatggggtcataaacagccaggaatgaaaaaaaatttattggtgccaaactgtagagaaaaaaaatgcaaagtcaagatgaatacacttgatgaaactcaaattgaagcccttgtgttatcatttattatttatatatatgcattatattggatgtggaatggggtgcatttctgtatatttaacgttttatgtaatgggtgctccaaaactaaaggagcccaggaggctcttaaaatagcccgcttcctgttagccagcaaactttcatgtcttttcctttcttttcttttcttttttttttttttctgagacaggatgtcactctgtctcccaggctggtgtgcagtggcacaatcatagctcactgcagccttgaactcctgggcacaccacaattcctggcttattttttaatttttttgcagagacggggggggtgggtctcattatgttgcctaggctggtctcgaactcttggcttcaagcaatcctgtcatttcagcctcccaagtagctgggactacagatgcaagccactgcccagcttatttattattgtgacagagtctcactctgttgctcaggctggagagcagaggcatgatcatagccactgcagcctcaacctcttgggctcaagggatcctcctgcctcagcctccttgaatagctgggactacaggcacataccaccatgcctaatttttttttatttttttgtgcagacaagggtctctctatgttgcccaggctggtcttgaactcttggcctcaagcaatcctcctgcttcagccccctaagtgctgggattacaggtgcgagccaccatgcacagccagtctgtggctttctagccatgacaaggaagtcctgacgagataatatagccatctcctcaccctcctgtatggccatctcatggtgaagaaagctgttatcccagcaagtggccacaaaagcttggacggagctccttctcaagtaaaagactataactagttttcaatgagaagctttctttttctttttcttttcttttttttttttttttttttgagacagagtcttgctctgtcacccaggctggagtgtacagtggcgcgcgatcttggctcactgcaacctccccccttccagtttcaagtgatcctcctgcctcagcctcccgagtagctgggactacaggcacccaccaccacactctgctatttttgtattttttttagtagagatggggtttcaccatgttggccaggctggtctcgaactcctgatctcaggtgatccgcccccctcggcctcccaaagagctgggattataagcatgagccactgcacccggccagatttattttttaatggaccacactctgcttctgctccttgcatttcagtgagttccacggcaccgtttccatgatatcacgactgatccatgcaggatcacggctaataaatggctctaaaacaacctgtgaagacataaccattaagtgtgccaggtaccaatctgcaattccacatgctgcacatacagctctgaagcgcacgctccccacaagcccgccgtggctttctcagaggatcgggcatatggaaccataatggagcataaatttacagcaacagagatggacgagggagattaaagcttcatctgtaaggacatactgcatggcaaaaaaaaaaaaaagaaaaaagaaagaaagaaaaaagaaaacaacagttattgtagtttctgctttgtagtataatgagaaactcagtcgcttttgatagagtgtgggctccctctgctgcttgcaggagacaccaggactccgggcatttggggttccttggagatcagcgcagaggaggtggcctgaagtgggaagagaaagatggggctgagcgttgcagacggaccgactggttctgcaggctctgaccctgtgggcttctcagagtaattatgctgctgctgcaccaagaagcaagaaatggaaataacagaaaaacgcaaagaaactgtaagatgcactggccagatcacctgtgtgcacagaggaatgcatcacggaagcaatgcagcctgcccagagcagcttctccttccctccctccctcccttcctgtttaaatttttgcagagatggggtctcgttatgttgcccaggctggtctggaactcctggcttaaagcaatcctcccgcctcagcctctcgagtagctgggactacaagtgcaagccactgctcttccttccttccttccttccttctttcccttcctcccttcctttcttctcctttcgtccctccctcccttccttccttttccctccatccctgcctccctccttccctcccttcctacctaccaaccttccttccttcctccttccttgtttcctccctccttccctccctccctcattcatttcccagtcacaaggtaggactgcacttccccacccgctttgatgttaggcatagtcacatgattcactttggccaacacaatataaagaaaaatgatgggtatcatctctggctggaaacttaaagggacaggtcgggtgcggtggctcatggctgtaatcctagcactttgggaggccaaggcgggtggatgacttgaggtcaggagttcgagaccagcctggccaacatggtgaaaccccatctctactaaaaatacaaaaattagctgggtgcagtgacacgtgcctgtaatcccagctactcaggaggctgaggcaggagaatcgcttgaacccaggaggcagaggatgcagtgagctgagattgagaggtgacagcatgctggcagtcctcagagccctcgcttgctctcggagcctcctctgcctgggttcccactttggcggcacttgaggggcccttcggcccgccgctgcactgtgagagcccctttctgggctggccaaggccagagccagctccctcagtttgcagggaggtgtggagggagaggcgcgagcaggaaccggggctgcgcgcagcgcttgcgggccagctggagttctgggtgggcgtgggcttggcgggccccgcactcggagcagccggccagccctgccggccccgggcaatgagggacttagcacccgggccagtggctgcggagggtgtactgggtcccccagcagtgccggcccaccggcgcggtgctcgggacctgcagtcttagctgccttcccacggggcagggctcgggacctgcagcctgccatgtctgagcctcccaccccctccatgggctcctgtgagcccgagtctcccggacgagcaccacccactgctccagggcgcccagtcccatcgaccacccaagggctgaggaatgtgagcgcacagcgcaggactggcaggcagctccacctgcagccccggtgagggatccactgggtgaagccagctgggctcctgagtctggtggggacgtggagagtctttatatctagctcagggattgtaaatacaccaatcagcaccctgtgtttagctcaaggtttgtgagtgcaccaatcgacactctgtatctggctgctctggtgaggacgtggagaacttttatgtctagctcagggattgtaaatacaccaatcggcactctgtatctagctcaaggtttgtaaacacaccaatcagcaccctgtgtttagctcaaggattgtaaatacaccaatcggcactctgtatctagctcaaggtttgtaaacacaccaatcagcaccctgtgtttagctcaaggattgtaaatacaccaatcggcactctgtatctagctcaaggtttgtaaacacaccaatcagcaccctgtgtttagctcaaggtttgtgaatgcaccaatcgacactctgtatctagctgctctggtggggccttggagaacctgtgtgttgaaactctgtatctaactaatctgatggggacgtggagaacctttgtatctagctcagggattgtaaacgcaccaatcagcgccctgacaaaacaggccagtcagctctaccaatcagcaggatgtgggtggggccagataagagaataaaagcaggctgcccgagccagcattggcaacccgctggagtccccttccacagtgtggaagctttgttcttttgctctttgcaataaattttgctactgctcactctttgggttcacgctgcttttatgagctgtaacactcaccgcgaagatctgcagcttcactcctgagcctggcgagaccacgagcccacggggaggaatgaacaactccagactcactgccttaagagctgtaacacataccgcaaaggtctgcagcttcactcctgagccagcgagaccacaaacccaccagaaggaagaaactccgaacacatctgaacatcagaagagacagactccagacgcgccaccttaagagctgtaacactcaccgcgagggtccgcggcttcattcttgaagtcagtgagaccaagaacccaccaattccggacacaagatcacaccactgcactccagcctgggtgacagacaagattccgtctccaattaaaaaaaaaaaaatttaaagggacagtgtgcagttcactaggttatctcttccctggtacttggtagcattgagatgacagctgctctgtcagcctaggtctcagagtgagaaaatgaggtaggaggcagaacagactccagagtcggggcttggacaccagaccagattgaagactagctaaaacagggatgtgctggaagctcctttccataagacacgtccaccagtgcgtcatgtcagtttaccacttccatggcaacacccaaaaattactgcccctttccatggcaatgacccaacaacctggaagttaccaccccttttctagaaatttctgcataatctgccccttgatttacatataattaaaagtgagtctaaatgtggctgcagcactgcttctgagctgctcctccaggcacactgcctgtggggtggtcctgctccgcaaggaacggcccctctgctgctgctgctgtgcatgagtgcttcaagagaagttgctatccgacaccaccagcttgtcctggaattctctcctgggcaaagccaagaaaccctcccaggcttagccccaattctggggcctgtcctgctaaggaagaagggagggtgaaagaaagaaagaaatgtgtaattagtttgttagggatgccatataaaactaccacaaactgagtggcttagaacaaaagaaaattgctggccatgcagaaagaagtactgcagtagctgatgataataattttcctttctgaaaatatcaggctgggcatgctggcttgtgcctgtaatcccagcagggatttgggagggattcgggaggccaaagtgggaggaaggtttgaggccaggagtttgagagcagcctgggcaacacggcaagaccccatctctgcaaaatgtttagagagctggacatgatggtgcgcacctgtagtcccaactcctagggaggccaaggcaggaggatcacttgagcccaggagtttagagttcagccttggcaacagagtgagaccccatcttttttaaaaaaaaaatattgtctcacagttctggaggctggaagtgtggtatcaaggtgtcagcggggccatactccctctgaaacctgtaggaagaggctccttccccatctcttcctagctacttgtggtttgctggtaatctctggcactccttggcttatagatacatcattccaatcatgttcatcttcccctgtgcatgtctgtctctgcatccaaattttcccaatttccctccctcccctcatcccccacctttctttcttttttttttttttttttttggtctgagacacagtctcactctgttgcccaggctagagtgcagtggcacaatcttggctcactgcaacctctgcctcctgagttcaagtgaatctcctgcctcagtctcccgagtagttgggattacaggtgtgcgccactatgcctggctaatttttgtatttttagtagaaacagggtttcaccatgttggccaggctggtctcgaactcctgacctcaggtgatccgccctccttggcctcccaaagtgctgcgattacaggcgtgagcaaccgtgcttggaccaaatatcccctttatataaggacaccagtcatactggattagggctcacccccaatgacctcattctaacttgattacttttgtaaagaccctatttccaaggtcacattctaagatactgggggtaaggacttcaacgtgtctttttgcagggacataattccacttataacagcaggttcacagagctcagcctttcagctggcttcttaccagtcaataaacccacccatacacttggagttcctaatcaaatctttcttgctttctccttaaaaatgaacaggttaggccgggcgtggaggctcacacctgtaatccccaggactttgggaggccaagacgggtggatcacctgaggccaggagttcaagaccagcctggccaatccagtgaagcccatctctactaaagatacaaaaattagccgactgtggtggtgcccacctgttgtcccagctactggggaggctgaggcaggagaatcacttgaaccgggaaggcagaggttgcagtgagccaagattgcaccactgcactccagcttgggcaacagagcgagactccattccccaccccccgcccaaaaaaatgaacaggctaatcaaggaccaccaactatctaatgacagcctatggcatgtgggagagactataataaccatgttttcttattttaaaattttagatacaggggtccacgtgcaggtttgttacacaggtgtattgcatgatgctgaggtttgggcttctattgatcctgttacctatataatgaacatagtacccaacagagagttcttcaactattcccctcctccctccgtctcactgtcagagtccgcagtgtctgttgtttccatctttatgtccacgtgcacccgagatttagctcccacttataagtgagaacatgcaatttttggttttctgttctgtgttaatttgcctaggataaaggcctccagctgcatccatgttgctgcaaagaacataatttctttcttttttatgactgcatagtattccatggtatctatgcaccatgcattttctagtttctgtttttgatgctctgacatcttggggccttgctgaccctggagggatggtccctcccagggctagccacatcctaaagatagtaagtgactctcctgtgagcacagctttcagatgcacaccagccaatccagaagtcattccccaaccacctccgtttcagggccctcacagggctgttacactcagggcaactatttctctgccctagtcaccccagggcccagtaccagactattagaagcagagcccacaaaaattactcaaactagccaatcctgagcctgcgtatctgcctcacctgttccttctcacagaactcacaaaaaaggctctcgtccacttttaccctcttccctctgcctcgtgactgcccctggcccctgtgtggtgtgccctgcctcctgtttctggcggtctgtgaatctaagctttttccttcatgaccgtcaattccgtgcctgtatgtcttcgcatatctaatttaaacaaatcctgggtacccttacaacagaggccaagaaaaataatcaggtataaaaacaacctgaaaagaaagaggactaactcaggaaatgaaagaggatgtttaattggtttccaattattattataacaatatttaagaagttattacactcaaaaatcaagaacaagatagtacgcaaacagcatgataatgctgcataaacagagtaaggagaataagtaaataaataaatttttaaacggtgcaataagggaacaagaaagtgttcttataaaataaaaatataatggcttaaataaattcaagagaaaggtcagatgataaaacagaagaagccttccataaagtaggacaaaaagaccgagatggaagacatgaaagaaaagggatatgaaagatttatccaggaggcccagtttacagttgtcccagatagagaaagatagaaatcaaagaggaaaaaagtatcaaatggacaacaaaacaaaattgcccaaaagttaaaggtagaagtttccagatcaaaagaatctaccaagcaaacaggacaagggcttttaaaaggcccaaacctttgcaaaatttcagaatcctgggaggaaaaggaaagattctaaaacttttctttctcttctttttctttctctttctttccttccctccttccttcttcctttcccattccccttccccttccccttttcttcccctccctccctctgtctctctctctctctctcactctctctctctctctctctctctttctctctttcggggctcactctcacccaggaaaattcctaggctcaagcaattcccacctcagcttcccaagtggctgggactacaggtatgcaccaccatgccctaatttttaagttgttgtagagagagggttctcactaggctcatcatgttgcccaggctggtctctaactcccagcctcaagcgatcctcccacctcagcctcccaaagtcctgggattacagctgtgagtcatcacacttgaccaaaagctttcagaaagagaaaaaaaaaaaacaccactcacgaaggaataggaatcagatttttgtatcacgaacaccaaatgctagaagacagatgagatgtacctttatactccaaagggagtggacactaaacacaactggatcacgaactgacaagaaaacaaacagtggtggtgaaggttatttgaataactggagagacaaatgtgggctacatcaagtagatgatactattttatctatattaatgtattgggtacaataattatattatatatgagtatatctttgttcttaggatatacacttaggagtgaactgacatatttgaaaccttcaaatggttcaaaaaaactgtgtgtgtgtgtgtgcatatgcacacacgtatgtatgtgtgtgtagacatataaagtcaatgtggcaaacttaatgattaatgaatgtatgggaaagatatatacacgttctttgtactattcctccaatttttatagatttgatggttttcacaatgtaaagtaaggaattttacaaattactaatatataacaaagttagaagggtaaattaaaaataacattttgtattatattttaatttaaagtaattctgaggggaaaatattttatccaaaagtctataaccaaccatgaattagtcaagtgttatggtcaattaaatatttagacatatgacaatatagaaaatttgtctatcacagactttttaaagacaattacttaaaaatgtgtttcaacaaacttaagggttaaaccaagaaagagcataaggaatccaagaaatagaggatgaaactcaagatggcaaggaaggaaaatctaggataagaggtatgcaacagtccccaccattcagtggggaaaggacagtcttttcaacaaatggtgctgggaaaactggatagccacatgcaaaaacatgaagtgggacccttacctaatgccatattaactcaaaatggaccacagacctgaacataatgagctaaaactatagaacttctagaaggaaacaggagaatagcttcataacgttagatttggcagttatttcttgggtatgacaccaaaagcaaaggcaacaaaagaaaaaataggtaagttggactttatgaaaattaaaatattttgtgcattgaaggacacaatcaacagaatgtaaatcccatggaatgggagaaaatagttgcaaatcatatactttgataagggattatctaaaatatgtaaagaactactacaacgcaacaacaaaaaaagaaaagcaaattttaaaatgggcaaagggctagaagagacatttttcttttcttttcttttcttttcttttttttcttgagacagagtctcgctctgtcaccaggctggagtccagtggcgcgatcttggctcactgcaacttccggctcccgggttcaagtgattctcctgcctcagcctcctgagtagctgggactacaggtgcgtgccaccacgcccagctaatttttgtatttttagtagagacagggtttcgccatgttggccaggatagtctcaatctcttgacctagtgatctgccctcctcagcctcccaaagtgctgggattacaggagtaagccatcgcacctggcctagagtagacatttctctaaagaagatatacaaatggccaacaagcacatgaaaagatgctcaacatcactaatcgttagagaaatgcatatcaaaaccacaacacctcacctcatacccgttaggatggttactatcaaaaacaatcaaaaaacaaacaaacaaaaaaacagaacacaacaaatattggtgaggagacggtgaaattggaaccttcattcactgttggttggaatgtaaaatagtgcagttgctgtggaaaatggtatggccattcctcaacacagaattatcacattatccaacaatttctcttctgggtatatatccaaaagtgaaagcacagacctgaacagatatttctacacccatgttcatagctgcattattaataatagccaaaaggtggatgcaacctaagtgtccattgtcagatgaatggataaacaaaatgtgctaggtatatccatacaatggaatatattcagtctaaagagggaaagaaattctgccacatgctacaacatgaatgaacctttaagacatatgctaggtggagtaagccagtcacaaaaggacaaatattgtatgattccacatatacaagatacccagaataggcaaattcatagaaactagaatgagaatgggtggagactgattattattctcagacccctcccacccccacccattcccattagaggcccctcacaccaacctaaatctttactgggtagagttccagttcaggatgataaaaaaaaaaagttgtagagattgatggtggacaaggtggttcatgcctgtaatcccagcactttgggagaccaaggcaggtggatcactttaggtcagaagttcgagaccagcttgaccaacatggtgaaaccccatctctactaaaaaatacaaaattagccgggcacagtggtgcacgcctgtggtcccagctacttgggagactgatgcaggagaatcgcttgaacccgggaggtggaggttgcagtgagctgagattgagtgacaactgcacgataatgcatttcataccactgaaaagtacacctaaaaatggtgaaaatggtaaattttgtattgtgtatattttgccacaattaaaacacacaggccaggtgtggtggctcatgcctgtaatgttagcagtttgggaggctgaggcaaaaggattgcttgagctcaggagatagaggccagcctaggcaacatagcgagaccccatctgtatttttttaatgtaaaaaataaaataacacacacacagacaaacaaacagaatctgtatgagtcacacgtttaggtagctgaatatcctctctgcccccaattcccccaagtcaaaggcagaagggatttgttccaccaaagagtttacaccagccacagctgcccactgcagtatcctcccaggaaaagcccttttgtgcgtggaggaggcagatggcgaggaggcagatgtgcactttttttttttttttttttttttttagagacagggtctggctgtgtctcccaggctggagtgcagtggcgagatcaaggctcactgcagcctcgaacttccgggctccagcgatcctcctgacacagcctcctgagtagctgggactacaggtgcacatcaccgcgcccaactagttttttaaaattttagtagagataggctcttgccatattgcccaggctggtctctaactcctgacctcaaatgaccctaccgcctcccgaagcgtcgggaccacaggcggcgagccaccggccggcctctgtgtgcaccgaggagccgggcagccaccgccacgatccagctttaggacatttccatcaccccactcagccttcctgcgcccctggttcctcatctataaatagagataatatacgcctaaccctctaggtcaccagcacattgcacccataattattatacttgttgatgccacactttcaggttttaacctttccaaagcgcagccccgccccagcgcagcccaagtccctgcacgcagaggcgccgatcacgggtgggaggtggatcccggaggccccgccccaggccccgcccctccgtgcgcccaagctcgaccgcctgaaatcggggaatcgggcctctgccggcgccctggcagcggcgcggggcgtggctccgggctggattggtggcgcctgggccccgcgagcgcctgcgcagtggtcaaggccgcgctcgcgccgaggggctgcgagagtgaccgcggctgctccagcgctgacgccgagccatggcggacgaggagcttgaggcgctgaggagacagaggctggccgagctgcaggccaaacacggggtgagcgcatcagcccccgccaggcttggccctcgcggggcgccgccctcgcccggagtgtagggcgcgcctccggggcggaggctctgggcgcctccccggggccccggtcccctgcgctgccctggcggcctcgtggccggctcagaggtggcctcgtcgctttcctcgtcgcgaggggcccaggaggctggcggcgggggccgccacgtgcgggacctgccctggcgttggggtgtggggtcccctagcctggagcgggctcgtcctggcgggcctggatccaagcacaatctcagcttttggagccagcagccggaccgaattcagtttttccggagttcagttgttatgacccaagtttagccgacaggtattgagggtccgctgtgttcccggtgctgagagcgcggcagggtcggaggaacgcttgccccgccgggatgacagggaggggccgcctgggaagcttggatggatcacacgcccggagaggcgtttctgataagggaccgggaccttagggacggagggcgcagtctttgagttatcgttgtccctaataccgaggcccgttttattttccagaaattattcctacatgtgaaacacggtttcgtaatacagggattcccctccccagggtgctctgtattccaaagccttctgaggttgtggttttagacgttcatcaaaacgttgtaagtgggaactagttcattgatttctgtgaggcccagtttcttatttggggagttgtttctaccaccgcaagagactgttatgtataggaaacaacagaaccgttcctttttcccgccgcctcccgtgaaatttctctattaaatttaagttttttttttccaggatcctggtgatgcggcccaacaggaagcaaagcacaggtatgggctggaaacgtgaactttttgaagggtggtttcaccaaatggatttcttttgctgtagttattttaagcaggtgtgtgactcagatttttttgttttgctggaatggtgatttggccaaaatcatccgcagggtatcttcattattgttaaataaacacgtgtgcagctccacatcagaccttgtattgcaattactggttgatgtttctctgctacaatgtgagtaccttaaaaatgagcctgataataggcagctgtggcagtttcctcggctgtgggggtgacgtgagtccggtgcctcacttagtaagtgctcaataagtgttaactggtaagctattctgattgttttatcccaacacagcgcacagcacctgagacagatgcaggtaattgattcggtggcaggtttattgaatgagtatgtgattaccctatcatgctatcattttttaaaaattgtggttaaataaaatttcaccatcacaaccatttttaagtgtgctcttcagtagtgttcacactctagaatgttttcatcttgcaagactgaaacctttagctactggacaattctctatttccccttcctcaccttcttactcctcctctccagcaaatatttatagagcacctgctctgggtcaggcactgtgctgggtctacagaaataggaagggagggttcgggagaagacagacggtgagaagtatctggagtagtgataggaagtaaaacgacgcaaatttcattgatttctgccgtgtacatcttttcattgtcacatatctgaaatcaggatgccttttaaaacagattgctcttgccccagattcttccagaggggatttacttttgactctgctatcacttgagtacatttctgagaccattgaaagttaaattctctgcttgaggttttcccctgcctcctgcctagtagtgtgaattcagacagcaaccctgtaagactgaacttttttcttctttacgtcagggccaggtgcatgcaagcttttgtactgccccttactgcatggcatatttatttattctttactttgtactgagaatgttgctctttgataccccagtggtgggatcagaactcactgcagcctcaaactcctgctgggctcaagtgatcctcccacctcagcctcctgaggagctgagatgacaggcgtgcaccaccatgcctggctaatttttttaaactttttttttttttaatagcctcgctatatcacccaggctggtctcaaactcctggcttcaagtgatcctcccaccttggcctcccgagaaaccccagttttgaatggagatctctattagacctctcattttagggtttttcatttttagagatacgtaaaactatggtgtatcttagaattgatggcatcttagggttctgtgatataatagtttgtggcaggccaggtgtggtgactgaagcctgtagacccagctactcaggaggccgagggggaagaatcacttgagcacaggagcttgagctgatcatagctgcagtgagctgtgattgcaccactgtactccagcatgaacagcagagtgagaccccatctttttttattgttgttgagatgaagtctcactccatcacccaggctggagtgcagtggcacaatcttggctcaccgtaacctctgcctctgagcttcaagcgattctcctgcctctgcctcccaagtagctgggattacaggcacccgccaccatgcccggctaatttttgtatttttagtagagatggggtttcaccatgttggccaggctggtctcaaactcctgacctcaagtgatccacccacctcagcctcccaaagtgctgagattacaggcatgagccaccatgcctggcctagaccccatctcttaaagtttgtggcagggctgcagtactcaaaccataaagaagtggcctatggaaatgagctttaagccacattccatgaaccgaagggcctctgagctgggagtggatagtgggcacagccagccccagctctccctctcagttgagccaaagcatctgtgctcatttgtttttagatttcttaaaggatttcatttgaaagaaaaaagaaacaagtccatgagaccactgtcctgtgaacgtgaactactttctatttgggtaggtaggaagaagtgaggatagttgcaaagttataatttcattccccttccccacccagaaaaatagaactgagagtcttaaaacatggaatctggctgtagcttggccacagttacctatgtctctttagcatagcctcctggatctcagctttatctctaagaaaatgatatagattagtcacatggtccttctaattgcctgaaatcccactataaatttctagcacctgtcacgcaataggtacttaagaaatgttggtgatggtgtttgaactgaggctccactctgatgaaactgtaaagctcaccttccagcctggtaggttgtcacctgtgtaatataaagctggttctttgagggcaaaaggggattctacttgaatgtagctgcagccttatgtacagcaactaccataatgcagtttgtataccgcaggccccatgtggagacacatactggatgggttctttctcgtatgttacatgggaatgccgacagctgtgttttaattgtgtttgacctatgttttcgttgtagggaagcagaaatgagaaacagtatcttagcccaagttctggatcagtcggcccgggccaggtgtaagcatctttgatttcatttccataaagttagcttgagttagttgaatggggtgattagataccattattgctatcactagatgaaatatttgcttaggctgaaaacacttgagatgtgtaagaagtgtgaagtttataaacctagagaactgtactttaatccctagtaaaagtaccaggtcacttctcttaccaagatgttctccaggtgtgtattaggtaagatttataggaaacaactcatagggccaatcacaaaatgttgctggtagttgacattttgtgtcaactggtgatggggactggggatgggggacttaggggctttttatatgtattgtcagttttagtgtatgttcagagttgttcatcataaaaaccaaaacctgtagaaagaaaaaatgagacagtcagaatgaactggtattttctgtattttaactggaagcccagtttgagtgtagaaaaggcggccacaggtggatcaccaccattatgtgtaatagataaaccgctttccagagggcagtcatatattttaagaaacaggaagcatggtgcttagaatctgagaacccaactttaatcttggctgggccactacccccatgtgcccatgtggagattggcatgggtgaacttcagttttctcatttttaagaggagtaacaatactgtcttgccctacactgagggacaagcttgtgaagtgctttggaaaggtcaatgcatagttttaaggtataacataagtgcatttgattttaatggattttttgcatatgtattttttctttttagtaagtaacttagcacttgtaaagcctgaaaaaactaaagcagtagagaattaccttatacagatggcaagatatggacaactaagtgagaaggtaagcttagacagccttgaggaactttactgttacctgctttatcaaaacatggcttcaaaaggtcagctgcatcttcactggattacagaattcttgctgactctcagaagaaattgttggagagaatagtcatacctactttaaaagagaataaattgcctttcctaaattcctctgcttcgctcctttcctggcgttgctctggaaccttgttggtgtctgtgacccaatgactgttagggtcagctagcttcaattgcccctgcactggaagcaaggtttgtcagtaacaccaattaaaatactaccagtgtaagtagaaggtgtgttttgcagatgagaaggtgctaagatgccttgcttatgttctctgtgttgctgtaataccatgaggggtatgttgtggcaaacctggcctttgagatcaagacgaaccccacctgccctgagaagccgtctgctaccaccacagcctacccgaattggtcctgtcccctaaacccctcacactgagaactgcttgtgtgggagagagctggttgggttgatcttttccgagtgtgacttacctccttcaaggggatgtttaagcttctcgggcagaagtggtgtgtctattcctgacaccaaacaccgtggtatatgtggttgtcacactcagctagtgatgataaaggtgttcttaaatatgttagctttcagttttcctgaggaagcaattttatggatacttccccctccttctcaagtgaggaatagcagagcaaattttatttggaacttaaaccaatagttataaccaatagtttcaacctcctgcctcaccactgcttccttcctgagctctttccccacacctcaaaaagagtacaaagtgattccatctgcagaggtaaattctttgtttaaaaaagtactgtttttcttatcttttctggttctcctaggtatcagaacaaggtttaatagaaatccttaaaaaagtaagccaacaaacagaaaagacaacaacagtgaaagtaagtgtccccagatgcttgtggcaaatgaaaagatggatactttaaagattaatgttgagtatacatctaccacacatatttttcagcccagagacattttccttttgtcaaacacgtgaaagtttggggagaaaggctgaatctgttgggggagggttctaatttttataggctcttgactccattcccacccttttagttcacgctaagttgctttaaagacacaaatgtcttgctaaaattggtagaaatcttttctcggaaaatctgagttatgctttattagaaatgttctgacactcatttaattttcctcccagttcaacagaagaaaagtaatggactctgatgaagatgacgattattgaactacaagtgctcacagactagaacttaacggaacaagtctaggacagaagttaagatctgattatttactttgtttattgtctatatgccttttaaaaaaataaacttgttatgcaaaataaaacatttgggtaagttgttttagtatcatagccaagtggccagatctgtgttttgaatttttccccttcctaccaaaagctttttttatttttatttttgttattatactttaagttttagggtacatgtgcacaatgtgcaggttagttacatatgtatacatgtgccatgctggtgcgctgcacccactaacttgtcatctagcattaggtatatctcccaatgctatccctcccccctccccccaccccacaagagtccccagagtgtgatgttccccttcctgtgtccatgtgttctcattgttcagttcccacctatgagtgagaatatgcggtgtttggttttttgttcttgcgatagtttactgagaatgatgatttccaatttcatccatgtccctacaaaggacatgaactcatcattttttatggctgcatagtattccatggtgtatatgtgccacattttcttaatccagtctatcattgtgggacatttgggttggttccaagtcttcgctattgtgaatagtgccgcaataaacatacatgtgcatgtgtctatatagcagcatgatttatagtcctttgggtatatacccagtaatgggatggctgggtcaaatggtatttctagttctagatccctgaggaattgccacactgacttccacaatggtcgaactagtttacagtcccaccaacagtgtaatagtgttcctatttctccacatcctctccagcacctgttgtttcctgactttttaatgattgctattctaaccggtgtgagatgatatctcattgtggttttgatttgcatttctctgatggccagtgatggtcagcattttttcatgtgttttttggctgcataaatgtcttcttttgagaagtgtctgttcatgtccttcgcccactttttgatggggttgtttgtttttttcttgtaaatttgttggagttcactgtagattgtggatattagccctttgtcagatgagtaggttgtgaaaattttctcccattttgtgggttgcccgttcactctgatggtagtttcttttgctgtgcagaagctctttagtttaattagatcccatttgtcaattttggcttttgttgccattgcttttggtgttttagacatgaagtccttgcccatgcctatgtcctgaatggtaatgcctaggttttcttctaggatttttatggttttaggtctaacgtttaagtctttaatccatcttgaattgatttttgtataaggtgtaaggaagggatccagtttcagctttttacatatggctagccagttttcccagcaccatttattaaatagggaatcctttccccattgcttgtttttctcaggtttgtcaaagatcaaatagttgtagatatgcgtcattatttctgagggctctgttctgttccattgatctatatctctgttttggtaccagtaccatgctgttttggttactgtagccttgtagtatagtttgaagtcaggtagcgtgatgcctccagctttgttcttttggcttaggattgacttggcgatgcaggctcttttttggttccatatgaattttgaagtagttttttccaattctgtgaagaaagtcattggtagcttgatggggatggcattgaatctataaattaccttgggcagtatggccattttcacaatattgattcttcctacccatgagcatggaatgttcttccatttctttgtatcctcttttatttcattgagcagtggtttgtagttctccttgaagaggtccttcacgtcccttgtaaggtggattcctaggtatttgattctctttgaagcaattgtgaatgggagttcactcatgatttggctgtttgtctgttattggtgtataagaatgcctgtgatttttgcacattgattttgtatcctgagactttgctgaagttgtttatcagcttaaggagattttgggctgagacagtggggttttctagatatacaatcatgtcatctgcaaacagggacaatttgacttcctcttttcctaaatgaatatcttttatttccttctcctgcctaattgccctggccagaacttccaacactatgttgaataggagtggtgagagagggcacccctgtcttgtgccagttttcaaagggaatgcttccagtttttgcccattcagtatgatattggctgtgggtgtgtcatagatagctcttattattttgagatacatcccatcagtacctaatttattgagagtttttagcatgaagggttgttgaattttgtcaaaggccttttctgcatctattgagataatcatgtggtttttgtctttggttctgtttatatgctggattacatttattgatttgcgaatgttgaaccagccttgcatcccagggatgaagcccacttgatcatggtggataagctttttgatgtgctgctggattcggtttgccagtattttattgaggatttttgcatcaatgttcatcaaggatattggtctaaaattctccttttttggttgtgtctctgccaggctttggtatcaggatgatgctggcctcataaaatgagttagggaggattccctctttttctattgattggaatagtttcagaaggaatggtaccagttcctccttgtacctctggtagaattcggctgtgaatccatctggtcctggactctttggttggtaagctgttgattattgccacaatttcagctcctgttattggtctattcagagattcaacttcttcctggtttagtcttgggagagtgtatgtgtcgaggaatttatccatttcttctagattttctagtttatttgcgtagaggtgtttgtagtattctctgatggtagtttgtatttctgtgggatcggtggtgatatcccctttatcattttttattgtgtctatttgattcttatctctttttttctttattagtcttgctagcagtctatcaattttgttgaccctttcaaaaaaccagctcctggattcattaattttttgaagggttttttgtgtctctctttccttcagttctgctctgattttagttatttcttgccttctgctagcttttgaatgtgtttgctcttgcttttctagttcttttaattgtgatgttagggtgtcaattttggatctttcctgctttctcttgtgggcatttagtgctataaatttccctctacacactgctttgaatgtgtcccagagattctggtatgttgtgtctttgttctcattggtttcaaagaacatctttatttctgccttcatttagttatgtacccagtagtcattcaggagcaggttgttcagtttccatgtagttgagctgttttgaatgagtttcttaatcctgagttctagtttgattgcactgtggtctgagagatagtttcttataatttctgttcttttacatttgctgaggagagcttccaactatgtggtcaattttggaatcggtgtggtgctgaaaaaaatgtatattctgttgatttggggtggagagttctgtagatgtctattaggtccacttggtgcagagctgagttcaattcctgggtatccttgttaactttccgtctcattgatctgtctaatgttgacagtggggtgttaaagtctcccattattaatgtgttgggagtctaagtctctttgtaggtcactcaggacttgctttatgaatctgggtgctcctgtattgggtgcatatatatttaggatagttagctcttcttgttgaattgatccctttaccattatgtaatggcctctttgtctcttttgatctttgttggtttaaagtctgttttatcagagactaggattgcaacccctgccttttttgttttccatttgcttggtagatcttcctccatccttttattttgagcctatgtgtgtctctgcatgtgagatgggtttcctgaatacagcacactgatgggtcttgactctttatccaatttgccagtctgtgtcttttaattggagcatttagtccatttacatttaaagttaatattgttatgtgtgaatttgatcctgtcattatgatgttagctggttattttgctcattagttgatgcagtttcttcctagtcttgatggtctttacattttggcatgattttgcagtggctggtaccggttgttcctttccatgtttagtgcttccttcaggagctcttttagggcaggcctggtggtgacaaaatctctcagcatttgcttgtctgtaaagtgttttatttctccttcacttatgaagcttaatttggctggatatgaaattctgggttgaaaattcttttctttaagaatgttgaatattggcccccactctcttctggcttgtagagtttctgccgagagatccgctgttagtctcatgggcttccctttgtgggtaacctgacctttctctctggctgcccttaacattttttccttcatttcaactttggtgaatctgacaattttgtgtcttggagttgctcttctcgaggagtatctttgtggcgttctctgtatttcctgaatctgaatgttggcctgccttgctagattggggaagttctcctggataatatcctgcagtgttttccaacttggttccattctccccatcactttcaggtacaccaatcagacgtagatttggtcttttcacatagtcccatatttcttggaggctttattcattttattttttctctaaacttcccttcttgcttcatttcattcatttcatcttctatcgctgataccctttcttccagttgatcgcatcggctcctgaggcttctgcattcttcacgtagttcttgagccttggctttcggctccatcagctcctttaagcacttctctgtattggttattctagttatacattcgtctgaatttttttcaaagtttttaacttctttgcctttggtttgaatttcctcctgtagctcgtagtttgatcgtctgaagtcttcttctctcagctcatcaaagtcattctccgtccagctttgttccattgctggtgaggaactgcgttcctttggaggaggagaggcgctctgctttttagagtttccagttttctgctctgttttttccccatctttgtggttttatctacttttggtctttgatgatggtgatgtacagatgggtttttggtgtggatgtcctttctgtttgttagttttccttctaacaggaccctcagctgcaggtctgttggagtttgctagaggtccactccagaccctgtttgcctgggtatcagcagtggtgtttgcagaacagcggtttttcatgaaccgcgaatgctgttgtctgatcattcctcaggaagttttgtctcagagtacctggccgtgtgaagtgtcagtctgcccctactggggggtgcctcccagttaggcgggtcaggagtcagggatccacttgaggaggcagtctgcccattctcagatctccagctgcgtgctgggagaaccactgctctcttcaaagctgtcagacagggacatttaagtctgcagaggttaccgctgtctttttgtttgtctgtgccctgcccccagaggtggagcctactgaggcaggcaggcctccttgagctgtggtgggctccacccagttcgagcttccaggctgctttgtttacctaagcaagcctgggcaatggcgggcgcccctcccccagcctcgctgccgccttgcagtcagcgagactctgtgggcgtaggaccctccgagccaggtgcgggatataatctggtgcgccgttttttaagcccgttggaaaaggcgcagtatttgggtgggagtgacccgattttccaggtgccgtctgtcacccctttctttgactaggaaagggaactccctgaccccttgtgcttcccgagtgaggcaatgcctcgccctgcttcggctagcgcacggtgggctgcacccactgacctgcaccgtctggcactccctagtgagatgaacccggtacctcagatggaaatgctgaaatcacccatcttctgcgttgctcacgctgggagctgtagaccagagctgttcctattcggccatcttggctcctccctgaccaaaagcttttaagcacgtgtaccagcatgactctaccctttgcaactgtgccatgaatattagataggaaaagtgtccgtggcggaaacagaagctgctccagcactcttcaggaagaaaaatatagcagcagcagcagcagccgccaataacataaggggaattaaaacctgtccatcagactgaatcaggttcaacatttgagcacatctaatattctaagatgtagattctgaaagcaggtaagctctttctcttcctgcagatactacttccacttaatgtaagaaaattcctagctttgccaggcacagtggctaacacctgtgatcccagcactttgggaggctgaggctggcaggtcatttgaggtcgggagtttgagaccagcctggccaacatggtgaaaccctgtctctactaaaaatataaaaattagctgggcgtggtggcacacacctgtaatcccagctacttgggaggctcgaacctggtaggcagaggttgcagtgagctgagatcaggccattgcactccaacctgggtgattccatctcaaagaaaaaaaaaagctagctttgatctcatttataattgtttttcagaggtactgatattaacaaataccactccctccaaaataactagagtgataatgactgaaaaagaaaatgaccaaaatagacatgttggtaatgctactacagtaataaacatgtttgtaagagaaatgacttctaatgatttcaaatccagttgagacacttcagcatttaaacattttggtaacatatcactgataatgttgcaggtgacttaaatgttctctcttttgttgtgctttctttccactaggttatgaaaacctgcactcataagttacggttttcagagacggagacttgctgtgttgctgaggctggcctcaaactcctgagtttaactgatcttcccacctcagcctccctcgtagctgagactgtaggtgcaagccactgctcatatatttaaatcataaacttaaccatcaaccagctgtttggtgtaaccttttaaatgtcgtagtcctgtgagacctagcacaggattaaattcataaatttaacaaggtgaataggattagtaaaaaaatgaagggaaatgtggtttgcaaaccccagtctctgcgttagccagcatactactgatacatgtttaaactggagattctactatatttgaaatttgcaactattgtcagtgaagaaatagaacaatatctaacattataaataagtagaaccgttgagaacatcaacatatttttaaaagaatgatcataagatgaaatctggctggggattttctgtcagggtaaactggtaatttaaaaaaaatttggtcggggattttgaaaaaaatcccatttacaggtaaattttgctttaggcctcatttacatacaaatgctaggaggacatgaggcagttcacaagttctgtgctttctcacaggataaccactgtcctaatggcaactgctgtgagtgtgtttaaagatggtcagactctttcagacacctacctgagagtgaaaagtggttccatgtacaaggagagaggttcctgatggcaataagaggctggagtacattttagggagtggagagtggttattctaaactttctaatttaaatcagtgaacttgcgttactttgaattcaaaacttttttccacaaaaatggaaattaggggcattaatttctcaactgtcacatcaagttttgggtagggaaagcaattggaaaaaacaactggttgtttgcttttttttgagatggagtattgctctgttgccaggctggagtgcagtggcatgatcttggctcactgcaacctctctcccaggttcaagcaattctcctgcctcagcatcccaagtagctgggattacaagcgcacgccaccacacccagctaatttttgtacttttagtatagacagggtttcaccatgttggccaggatgacaactgttttttaaaaataatcgagggagtcacttaagatggaaaacattactgatgaccagaatagctcaaaaagaaacagcatttacctctccagaggaagggtacaccaagcttgcagctgccactgccaaccaggccttgatcctggctgtgagatccctcgcagtccccttatttttctgaacctgtttcctcatttgacaattctaccattcacagtgattgttgaaattaaatgggtatatgtgaaaatgttttcagctgggcgcagtcgctcatgcctgcaatcccagcacttcgggaggccaatgtgggcagatcacttgaggtcaggagttcaagaccagcctggccaacatggtgaaaccccatctctaccaaagatataaaaattagccaggcatggatggtggcaggtacctgtaatcccagctatgcgggaggctgaggcaggagaattgcttgaatctgggaggcagaggctgcagtgagccgagatggtgccactgcactccagcctgggtgacagagcgagactccatcatctcaagaaaatgttttcaaaattatattgcactaccccaacatattaggtggtgtcaaatgtgtgtatttgtatcttgagaatacctgtgctgataaactgtataggatgtattaattaggatggtatagaaccacagcagcttcagtctataaggtggttttgtttaaaagtagggaaggctgggcatggtggctcacacctgtaatcccagcactttgggaggccgaggcgggcggatcacgaggtcaggagattgagaccatcctggctaacacggtgaaaaaccctgtctctactaaaaatacaaaaacaaaaaaacaaaaacaaaaaaaacactagccgggcatggtggtgggttcctatagtcccagctactcaggaggctgaggcagaagaattgcttgaacctgggaggcggaggctgcagtgagccgagatggtgccactgcactccagcctgggtgacagagcgagactccatctcaaaaaaaaaaaaaaaagggaaaaggaaaaatcagaacaaagaaattagcaaagcaacagggctcatttcctgtttgtttggggtaggaagctgtattcattttattcttctgatttccaaagaaaaacatttttgtgggcccgggacactgtgcctactgggttaagtaggccttggtcagtagatgaataatgagctaagtgatcaagttcccatgtttcaatctcacatctataactgaaaaatgtatatccattcaatggggaccctttttctcacacacaaagcacatgtttacagcagacaggctgagaaacatatcatctgcagccaaacaactaaaaaaaaataccatgacacagtcaagaatcataaagtttactgtttcttttccatcatttggcacatatccaaggcacattagaaaattagaaatcataaattactttgtagaaaaataatccctcccttccttctgtacatacacaagtatttccaagaacatggacaaaaccatttccctatcacaaggtcatttgaaaacggactcaggacaaacccatatacgtgtagctctaggccaataacataaaaataacagtataatctatagaaatttataaaaaggaataaatggcaataaattctaaccgaaagtaactctgacctggtttgtgctgttaagttttgaatttgaatcaaaagactaagaaaagatgtgccaaatctactctctaatccagtaaccatcccgtcaggtgtgagtgtgacagacattcaagggaggttctcaacaaaaagggatgtttctagaaatactgctacaggtgcacgtgtagtaaccgaatatctgtacctacttgttagaaggaaaatgataaccaccctttcccatgtgcatgatgtggaacaggtctgatgcatcctttcactaaaatgaatatcaaaatgggattgaggcatcttttggttcgagtgttgctttgcaaagaaacattgtccagctgctgctttcttccttcagatatgacatttcagcctggcctctacagtaccatgaaacctaaattacttacttctctccagcttaatcctaggtggaggaattctagctgtggtttgtgaatgtacacaggtcagagaggtttagcaccttttgggaggaggaggtcagaatgcggtggtgaaacctctcccactgtgaccaacaaaccctcatacttaaaaagaagcatgcacctctggcttaaggatctggatgctactggaatttttgtctgtttcaattgtattcattagctttgaagaggagagagatggtggtggttaacttttttgttgcattctttcctgccacagaaaagctttcaggaacttggtgctgaagacttctcaagccagtctcatggaagcacatttagttctcagatgtgttcacgctcagcatcatcttgttgcatccttgcttcctagcagtgggttcaacaactcctcattcctgttaggaccgggaagcactaacctcttggggagtggagagggggccagcagcctccgggccctgggacacgaccgcatcctctaccgtgtgtctccgcagcatccgtctgtgtccagggccagtctgtgtcagtccaggcctctctggccagtcgctgttgcctttctcagcagcatgagatccactctgagctggcaggttattctgtctcagtgtgacactttgcctccctggctaaagaaaaagtacatttttaaccgttgacgtcctcactgtactggaagccacaaccatgacagtgacagctgccccttagtgcctagtgtcacataatgtgctcagtgcttgacaggcataatttcaattctcacatccctgtcgtggtaacatggcatgtgcatactacatgtgtcagagtaaatgtttcacttgttttcacaatctttatgactctaggaggcatgtactactattgttatccccgttttacacctgaggaaacaggatcagcaaagttaagccacctgcctaaagtcctacagctagcaagggaaaagctagcacttgatggaactcaggcagatttcaacgattctggctttcccacaaagcagcaggtctcctagcaacaccacataagactaaatatggtatcaaaattagtcatgttaattaaaatcattttaattatctaaaacaatttagaacttttgtgtatttgttccaacaagcctatgctacatatgctataaattctcatcagcaacaaggaaagctgtggttctgagaagaatcactgtctccgatcacaggttttcaatcaagcttctgagtgatttaaaaatgcagtagggtccgggcacggtggctcacacttgtaatcccagcacactgggaggccaaagcgggcagatcacttgaggtcaggagttcaagaccagcctggccaacgtggtgaaactgcgtctctactaaaaatacaaaaaaattagccaggaatagtggcacatgcctgtaatcccagctactcaggaggctgaggcgggagaatgcttgaacccgggaggtggagactgcagtgagccgagatcgtgccactgcactccagcctgggccacagagcaagactctgtctcaaataaataaataaaaaaatgtagtgggaagatggccacataaagaattgtctgagcaactgtacaccatacttggagacatcatttacccatctatatacaaactgtcgttttctttctttggtgattaaaaccatagtgaaatgtgggatgtttcatctcctataagcaccaagacctgtggtttcccacacatgtaacactttccactcctctgctcagaaatgtacttttagttataacaatcagtgaagtctgtactctacactgtcccatgaaataattccagttttaactgctgctaactcatacggcgcacggaataatgaagatgacgatcaaggagacgtgtttaccatggattacttttgacaaagccgggctttagaaaatatgattaaaagccagtgtttaataacttacctcatgcaaagaaccttcggttaaattagggacacttctatctcttgccataatctcccttgaagtctttcccctaaaacccaaaataaacgaaaataaatatttgggacagtggcatgaaacactctggttggccacaaggtggcagcatttttgacattagtaggtgcagatttgtccataaccaattacaattgaagcagcttacgtgcagcttggagtaaactaggggcaaaagcacagaaatcaacttgagtttcatactcacttaaactgaccagctgagtggacaaagtaaaactgtcttgtaaaaggctcatctggtagatcatacagttttgagttccctgtagataaaaagataaacatctaaaaacttcaaaaacagttgtaaagattattttaaaattacagcacagacacaatctttctattctcagatttacaaaatttagaaactgaagcactgaatttgcttaaagaaacacagctagtacctatttataacaggttgagtatctccaatccaaaaatctaaagcctaaaatgccacaggctgggtgcagtggctcatgcctgtaatcccagcagtttgggaggccgaggtgggcatatcacttgaggtcaggagttcaagaccagcctgggcaacatggagaaaccccatctctacccaaaatacaaaaacttagccaggcgtggtggcacgcacctataatcccagctactcaagaggctgaggcaggagactcgcttgaacccaggaggcagaggttgcagtgagccgagattgcaccaccacactccagcctgggcgacagagcaagactccatctcaaaaaaaagctacaaaatccgagacattttgaactctttgacttcatgctcagaagaatctgatttcctgatttggatcctcaaccaatgagtataatgcaaatattccaaaacccaaaacactgctggtcccaagcatttgagatagggggtagtcagcctgtattatgagaacccccatgaaatagaaaaataaaaccttaactcccttaactcccccagccacaaccaattacggtgagacagtctcagggttatcgagatatgtgaatgggtttatccatattattgtattgcattattgcatacctcactggataatatttcatattgtaaattaaaaaaaaaagtagaacaaggaccccttctaaactttttaaaaagaagaaaatacttcagtctcactgctgttcggcaactgctgttttaattataatcaacctccgtacacgtacaaacttaaaaaaaaatcttgaggccaggcgcggtggctcacacctgtaactccagcactttgggaggccaaggagggcggatcacttgaggtcaggagtttgagaccagcctggccaacattgtgaaaccctgtctctactaaaaatacaaaaattagccaggcatggtggcacgtgcctgtaatcctagctactcgggaggctgaggaaggggaataacttgaacccaggaggcagaggttgcgtgagctgagattgcaccactgcgctccagcctgggtgacagagtgagactctgtctcaaaaaaactaactaaataaaaaatcttggtggctcacacctgtaatctcagcactttgggaggccaaggcgggcagatcacgaggtcaggagatggagaccatcctggctaacacggtgaagcccctctctactaaaaatacaaaaacaaaattagctgggcgtggtggctggcacctgtagtcccagctacttgagagtgggaggcagctacttgaggcaggagaatggcgtgaacccaggaggcagagctggcagtgagctgagatcacactactgcactccagcctgggtgacagagcgagactctgtctcaaaaaaaaaaaaaaaaaaaaaatcttgaaaggtagcatttaccctggatgtccaggaaatgcccagaacacctgactttggaacatgaggcatgaaagaaactatcccagagactgttccccatctccataggcagacacctgaaccttcaaggtagtgttgacagtttctatcctatttcctcaggaaacatcattaccatcaaccagaaaactagtaacaaaaaaagcttacccatagtctgataaattgggaggtaacatacatttctttggtgcctgtatctcctccaggcatgattataattacactttacatatacaattaaatgaacaccagcaactactcatgaatgtctaaatatacccaacttgagcgtgacagaaagaacgtaaactcttacattttttcctgatcttaacagtgacatactccttgcggtcagtttcagccacatcatctaatgaagcaacacagcttggtaccacctgaagcaattccattatttttgaattctgcaatttgaaagggaaaaggaacagtaatgtttttattcttttttaataggttattatttgtttttgatctaaatgtcagtattagtgtgactgggcagaaaaagctcagaaataattacaaatggagcttggaggccataaagcccagtggtaaaagcaggcctgcatggggagcccggctctgcttttaccactgggtaaaagctctgccctctctgtggactccacgctggggattcaaccactccatgcaaccagctcaaccataataagatctactatcatatgcttatcatgaggctgttgagggcccccatatagtaagtactcattgaaacacattaattaactgggcacggtggctcacgcgtgcaatcccaccactttgggagactgaggtgggaggattgcttgagcccaggtgttcaagactagcctgggcaacatagcaaggccctgtctctatttaaaaataataaaaggccaggcgcgatggctcacgcctgtaatctcagcacttttgagaggccgaggcgggtggattgcttgagcccaggcagtcgagaccagcctggccaacatggcaaaaccctgtctctattaaaaaaaaattagctggtcatggtggcacacgcctatagtcccagctacttgggaggctgaggttggaggatcatctgcgcccaaaggttaaggctgcagtgagccaagattgcaccattatactccagcctgggcaacaaattgagactctgtctcaaaaaataataataataataaaattaaaaattttaaaaaccaaaaaaaattcaacataatcatttaagaaagtactaaactgagagtttaaaatatttcaattctgtcactgaaaattaatataaggaggccaggcacagtggctcacgtctgtaatcccagcacttcgggatgccaagggaggcggatcagttaggtcaggtgttcaagaccagcctgagcaatatggtgaaacccgtctctacaaaaaatacaaaaatttagccaggtgtggtgccacgtgcctgtaatcccagctactcaggaggctgaggcacgagaatcgcttgaacccaggaggcagaggttgcagtgagccaagatcacgccacaacagagcaagactctgtcttaagaaacaaaaaattactctaaggagcctgtccatggagtggattgatggtgatgttagcttctcagttgtgtcacttaacagcctactcgctgtctatcttgggtagaaaacaaaagaaagactcagcaggaaaacaggaacagaaagagctgccgctcgccaggggaaaaggacccttccccgccgctctccacgcaagcatccacagcactggagaaggcagtaggccaataatcacgattcctacaggactcaaggacttttactttcatttttttgagataaagtctctgtcacccaggctggagtgcagtggcacaatctcagctcactacagccttgacctcctgggctcaagcgatcctcccacctcagcctcctgagtagctgggactacaggcatgcacccctatgctcggctgattttttgattttttgtagagagggggtctcactatgttgcccaggctggtcatgagctcctgcgctcaagtgatcctccttccttggcctcccaaagtgctgggattacaggcatgagccactgtgcctggcctcaaggagttttaaatccaccaacaaaacaaaccttctccatcgtgctgctaagacaacggctgtgttcacactgtgaggatggtgacaccagaacatcatgacttgctccttcctgagtgcctgactctatgtaactaccggaccacagccctactgctagctgaggggggggcccctccactcaggcctttgaaaaccacctgtgaaaagaatgattcctggttcccagagcaccacctctgaccaggagactgaggaccagccatctacccacgctgtggacttctggcacaccaactacgcccagcccggcgatgccaagggccaggtgttgctattttagatccagcttaaacaaagggatccagagggagctgtgaggagctcaggattccctcggctcttcgaccctctccacctacctgttcagcacagtctacagccgtgcgctgccgcttgttcagcacctgaactgacgctccgtggagcagaagcagctctaccacgaagacgtgcttttcaatcacagcctcgtgcagcgctgtgttgcccttattgttagaagcgttaatggaggccccgtgctggaaagagaaaccacacgatcaaaaggaacgctacgaaacgtcagcatggaatctggctgtgggtatacaggtattcgctataaaacacattgttttttttatgtctgaaagtttccttaaaatttggggaggaaaagtaatactgagaaaaaaagatttatagacaaagagttcgctgcagcatttatcctaatagcagagaaaacagaagccacttaaatgtacagagcagaaacaggttcaaaaaaatcactatggtatatccatagttatgcaaccattaaaaatcaaagtttgagtaaataagtttctacattaaataacattaagacagaaaacaatacttggggccaggcacagtggcccatgcctataatcccagcactttgggaggcagaggcaggtggatcacctgaggtcaggagttcaagaccagcctggccaacatagtgaaatcccatctctactaaaaaaaaacaccaaaaaacaaaaaaattagctgggcatggtggtgggcgcctgtagttccagctattcgggaggctgaggcaggagaatcgcttgaaccccggaggcagaggttgcagtgagctgagagtaagccactgcattcctaggtgacagagcgagactccatctcggaaaaagagaaaacaatacttggcgaggccccgtggcttacacccgtaatccagcactttaggaggccagtgcaagaggatcgttggagctcaggagtttgagaccagcctgggcaacatagtgagacccccatctctactaaaaacaaacagcaaaaactagccaggtgcagtggtatgtatctgtagtcccagttagctgggaggctgaggcacctgagcctgggagactgaggctgcagtgagctgtgagggtgccattgcattccagcctgggccacagagcaagaccttgtctcaaaaaaaaattaataaataacactgaaactatacacatttgtcaaaagtccaccataatgagtttcccttgagtagcacagtcatggacaggttggtttttccctacttctttaagaaattctaatgcattcacataacctttttcaagagcagcagggacagaggcggccactcagcccatgctcaggtaacagcgtgacacattcccggtcggtgaggtgagacccaaacccttggcaaaagcagcgtcggagcccttgagaccgcatcccagatgctggggcaccatctgttcccatcggagaaccccgtgtgggaagacgcacgccctgctcctctccccagaggcctggggttgatgggtggccgggcctctccatccccagtgcgctgcgggggtcgctgggtggaggcgccctgttaactggcgcaggtgtgtagaatgaggacaggaaggggccctcacctgtagcagcagtgccacaagctcgtgatggccaccggagcaggcgtaaatgaggggcgtgtttccactgaggtccttcttattgggttttgcattcgaatctaacagacacttcaccacctgggccagagaaggaaaacgtgcaaacttaatcaaaatttctgtcatttcctgccagagaaaaattatgaaaaataaataaataaataaataaaataagaaaacaaagtttctggagagaaatgctcaagtttgatattcttttgacttgtctctgagcttatttttttgttgttgttctttttggtttttctttcttttttttttttttttttccagacagagtctcgctctgtcgcccaggctggagtgcagtggcgtgatcttggcttactccagcctccgcctcccaggttcaactgattctcacgcctcagcctcctgagcagctgggactacaggcgcctgccaccacgcttggctaattttctgtattttcagtagagacggggtttcaccatgttggcagggctggcctcgaactcttgacctcaggtgatccacccgtctcggcctcccaaaatgctgggattacaggcatgagccaccacgcccagccgtctctgagcttattgagaagactttagactctcaggagaaaagggaccaggtgaagaggggagggctaccatctgctgcggggctgctctgtgcggttgaagcgcagggtgacagtgatctcacttcacccgatgtgctgggcgacagtgatctcacttcacctttctatcctttctacctcagggagagctgcaatcgccactccgaatttacagattaggaaagccatgcctgaagctctatgctaggtgttggcgagagagatgcaagacctgaaatatggctcctttctttaaaaagttaacagtagaactgataaaggaaaatgaaaaaatatacacacagttttccttaaagaaaagcagggcctggtgctgtggctcatccctgtaatcccagtactttgggaagccaaggtgggaggatcgcttgagctcaggagttcaacaccagtctggacaacatggtgaaaccccatctccacaaaaaaaaaaaaaaaaaaaaaaaaaaaaaaaaaaagaaaaatttatctaggtgtggtggtgcacgcctgtggtcccagctactagggagggaggctgagatgggaggattgtttgagcccaggagattgaggctgcagtgtgagctgagattgcaccactgcactcccacgctccagcctgggagacagagcaaggtgatgtcttaaaaaaaaaaaaaaaaaaaaaaggcaaaaaaccccagcactttcaaaaagttaatcactccaaaattcaaaattcttccttgagcccctctatggggccctgactgttctttatgaagtgctgaactgtttggcccagagcaaggcactgtcggggtgtaaaggtggtaagatgaccatggggacagtgctcggtggccaccacacgagctcaagagccagatcctgctgggggcaagaatcagaatgacaacctcggtatcacccagatgggagtggcagtggggcagggactggctccacccccagggagcatcaaggctctgtgctccgaggctgagtggcctaccgtgtgcacctcagaatctcagggctcgggggagcagtgtcctccagggtagccaccaaacccctgcagcgttcctaccaagcacaaggtcctagcccaaagcagacaccctgctccaccacccccaacacacagcccgaacctgaaagtggccctgctggcaggccaggtggagcgggacggcttggtctgcgttcctggcacctgcgttggccccgtgcttcagcaggagggggatgaggtccgcccggccgtgcagggcggcgacatgcagcggggaggagccgtcctggctggtcacgttcacaccaagcccactggcaggaaccttcgccagcctctgggaagcgcagaagatggaaacacaaacgtcatcagtattgaagaaactgggctggagtgattggcaccatgtgccccccacagctcccacacacaatgcgggatcatggcgggatccaggatggattccaatttgtttagaagtatgtggcatgccaaaaaacaacttcctttttttttttttgagacagggtctcactctgttgcccaggctggagtgcagtggcaccaccatcatggctcactacagcctcgacctcctaggctcaagtgatcctcccgcctcagcctcccaagtagctaggtccacaggtgcaagccattgtgcccagctaatttttttttttttttttttttgtagagatggggtctcaccagctggcccaggctggtcttgaactcccaggttcatgtggtcctcccacctcagcctcccaaagtgctgagactgcagatgtatgccactgtacctggctaatttcacttttttttttttcaccagggctgtagagcctccaaatttcctttgaggggcatggccacagccccgcaaaggcgacgagattcacttgctgtttgcacctctgtttaaaccaccgctataagaaacagtgattcttgggtttaggtgagaataattttactttttgatgattaaaaatgttacctctttaaaaaaaaaaactgtatgctaaattaaaggctgaattttattatatgtaaattatatctcaaaaataaaaaagaagctggaaaacacacatgtgcacatacatacacacactaaatgaaataccctgcatatttatcagaatggctaaagttaaaaactcaaggctgggcacagtggctcatgcctgtaatcccaacactttgagagtccgaggtgggcagatcacctgaggtcaggagttctagaccatcctggccaacatggtgaaaccccgtctctaccaaaaatacaaaaattacccaggtgtggcggcacctgcctgtaatcccagctacattacaggcatgcattgggctgtagaatcgctcaaacccaggaggcgaaggttgcagtgagccaagatcacaccactgcactccatccagcctggctcactgcaatctctgcctctccggttcaagcgaattctcctgcctcagcctcccaagtagctgggattacaggcgtgtgccaccacacctggctgatttttgtatttgtagtagagacagggttttgccacgttggctaggctgggcaacagagcgagactccatctccaaaaaaaaaaaaaaaagtcaaaataccaaatgttggcagggatgtggagcaactggaatgctcaaaccctgctggagggaacagaaactactccaaccactttggaaaactggcagtttcttttaaggttaaacatatccttactatataatccagcaattatactcctaggtgtttacccaacaacgtatatatccacacaaaggcctgtaactcctaggtgtttacccaccaacgtatatatccacacaaaggcctgtacacaaatgttcacaatggctttatttacaaatccagaagcaggaaaactactcagatgtccattaacaggtgaatgaaacaacaaattctggtgtgtccacccaatcaactactatccagcaatgaactcctgatccaacatgggtctcaaaaatatcctgagtcaaagaaggcagacatgaaaagggacatgcgttagaattccacttacaaaagattctcgaaagtgttaactaatccatgatgatgaaaagcaggtcacgggttgcctgggagaggcgatgggggaatgggggggtcatagtgggggggaaggcaaaatctcacaggaaactcttgcaagtgagggaaacgttgtgtatcttgatggtggtgatggtttcacaggtttatatatctgtaaaacttgccaaattgtatactttaaatacatatgctttatgtaaatataaattatataaattataatgtatataattatatttcaataaaagatttaaaaacaaattctaaaacaccactggagaccgggtgtggtggctcacgcctataatctcagcactttgggaggctgaggcaggaggatcgcttgggcccaggagttcgaaaccagcctggacaacacagccaagaccctgtctctacaaaaataaaaaaaataggccagcaaggtagcttacgcctgtaatgccagcactttcgggaggccgaggcaggtggatcatgaggtcaagagatcgagaccatcctggccaacatggtgaaactccgtctctactaaaaatacaaaaattagctgggcatggtggcgcatgcctgtagtcccagctactcaggaagctgaggtaggagaattgcttgaacccaggaggcagaggttgcagtgagccgagatggcgccactgcactccagcctggcgacagagcaagaccctgtctcaaaaaataaataaataaataaaataaaatagcccagcatggtggtacgtgcctgtagttccaaccatttgggaggctgaggcaaaaggatcccttgggcccaagagtttgaggcttcagtgagctatgattgcaacactgcactctggccttggtgacagaccaagaccgtctctaaaaaaaaaaaaaaaaaaaaagtttaggccaagcgcagtggctcatgcctataatcccagcactttgggaggctgaggcaagcggatcacttgaggtcaggagtttgagaccagcatggccaatatggcaaaaccctgtctctactaaaaatacaaaaattagccaggtgtggcggcatgcacctgtagtcccagctactcgggaggctgaggcagaagaatgtcttgaacccgagaggcagaggttgcagtgagccaatattgcaccactgtactccagcctgggcgacagagggagactccgtctcaaaaaagaaaaaaaagaagtaatacattaaacaccactggaggcctggtgtggtggctcatgcctgtaattccaggactttgggaggctggggcaggaggatcacttgagcccaggagtcccaagctgtaagtgagctatgattgtgccactgcactccagcctgggtgacagagtgaaaccccatctctaaaaattaaaataaaataaaataaaataaaataaatcactgggctagaagaggatggggggagtggattttcatttaatcacagacatgaagcagtttagtggtgtgtctttttgagaaatcacaaaaagagaataagaggttttagaagtacagggaacctaagacttcacccaattgagttccacagtattttactgtgtaattaaagtgggaaaacacagggaggagaaaaatggcaaaaacagcagcagcggagatgcagcaatctcgccacacacaggtactgagggcccgagggcttcatcacttcccaccagatgctagggaacaccatctgcctttcttatcctgtgttttcatagccacccacctcggggaaattgtgttctggaccatgtgcatccagcagcagggggccaggtcaaaaggtgcacatccccagtgtacatgttacctcacagctgaaaaatgtgtgagggaaaactttagtcattttcaatatccttagagtcacccacgctgaagttctttttagaaatggtaaaattatcctacaatataaaggctaacaccactctatctattttataaagtcaaatccattttcttttttttgagatggagtttcactcttgttccccaggctagagtgcaatggcacgatctcggctcaccgcaacctccgcctcctgggttcaagcgattctcctgcctcagcctcccgagtagctgggattacaggcatgcaccaccacggccagctaattttgtatttttagtagggatggggtttctccatgttggtcaggctggtctcgaattcctgacctcaggtgatctacccgcctcggcctcccaaagtgctgggattacaggcgtgagccatcgtgcccggccaaattcattttctattttctattttatatttttagtttcttagagacagggtcttactctgttggccaggctggtctcaaactcctggcctcaagtgatcctctaacctcggcctcccaaagtgttgggattacaggtgtatgacactgagcccagcctaattctcttagtatgggacatacacatctataattagatagctaacacatgaatgcatgctatgtatgcaataccatttacaactgcttgaaagaagatgaaatactgaggtgtacacttaacatgacacaggcaggatctgtatgctgaaaaaaaatcacaaaatgttgatgaaagaagtcaaagaaggcctaaatacttggagagatgtaccatgttcatgaagactcaacatacgttgagtcatatgatgttatttctccccagttcatctataggtttaatgtaattcctatcaaaatccgagcaaggtattttgtagacatacaaaaactaattctaaaattgatatagctcagaccagtctgggtactataagagtgagtaagttagtaagtaagcaataggtaaataaataaataaaatttacatggcaaggcacaggccatagaatagctgaaatattcctggcaaagaagaataaattaggaagaatcattcaatccaatactgaggcttactacacagcatcagtcatcaagacagcgcggtactggtaggatgggcccatagatcaatgcagcagaacagagaacccagaaatagatccacacaatctatagccaactgaggtgcaaaggcaagtcacgggaggaaggagaggcttttcaacaaatggtgctggcgcaagtggacacttgtaggcaagaaaaaacaaagaagaacctcaacctaaatctcacactttgagtaaaaattaacacaaattggatcatggacttaactataaaatataaaattataacttaaaaaaaacaggagaaagttggaaatctagagcaaggcaaagaattctcagacttgacaccaaaagtataatccataaaaggaaatactgacaaatgagatgtctaaaaacctttttctctgtgaaagcccatgtgaggaaattatagacaagctacagactgaaagaaaatgtctgcaaagcacgtatctaacaaatatccacatatctagaatatataaattcaacgataaagccaaaaacaaaccaattagaaaatgggcaaaacaaatgaacagacatttcactgaagaacatatacagatggcaaataagcccatgaaaagctgttcaacagcatcagccattagagaaatgcaaattaaggccacactgagatagtactacacacctatctgaatggctaaaacagaaaataatgaccacacccagtgctggggaggacgaggaggaactggatcactcatacatcgctggtgggcatgtaaaatgatacagcctgcttgggaaaagactgtcagttccttataaaaatgaaccatggaattgccatgcaatgaccatatgactccacaattgcactcttgggcacttatcctagaaaaatgaaaacttgtgttcttaccgaaacgtctactctaatgtttgttcgtggcagttttattggtaatattccccaaactagcaacaaactacatgtccttggacattccacagtgagtatatgccaccattaaacaaatggaatgccaccccgccatggagaaacagacctgattctaggcaacagtgtggaatcaaacggagtgaagaaagtcaatcccaaaaggattgtatactgtgattacatttatgtaacttttttttttttttttttttgagacggagtcttgctctgttgcccaggctggagtgcggtggcacaatctcggctcactgcaagccctgcctcccgggttcacgccattctcctgcctcagcctcccgagtagctgggactagaagcgcccgccaccacgcccagctaattttttgtatatttagtagagacggggtttcaccatgttagccaggatggtcttgatcttctaacttcgtgatccacctgcctcggcctcccaaagtgctgggattacaggcataagccacttatgtaacgtttttgaagtgacaggattagggaaatggagaacaggtaagtggttgccagcggttggggatggtggggtgggcgtggcagggagagaggtgggtgtggctgtaagagggcagtttgaatgattggtcttgtgagagaactgtgctttccggtgacagacacatgctgcgtcttgatggtggtgatggcttcacaggttttacatctgtaaaagctcaccaagttgtataaatacatagactttattgtctgtgaattatacttcgataaaggatttaaagaccaattctaaaacactgggctagaaaagaatggcggggtgggtttcaatttaatcaaagatataaagcagtttagtgttctgtctttttgagacattacaaaacaagaacaagaggctgtaaaagaacaaggaggccaggcgcagcggctcacacctgtaatcccagcactttgggaggctgagatgggcgaatcacttgaggtcaggagtttgagaccagcctggccaacatggtgaaaccctgtctccactaaaaatacaaaaaattagctgggcgtggtggtgggtgctatggtccccgctacacaggaggctgaggcaggggaatcgcttcaacccgggaggcagaggttgcagtgagccaagatcgcccgacagagcaaggctctatctcaaaaaataaaaaaataaataaataaaaagaacaaggagtatataaaagtatctgtcacagaaaatatcttgaatgtgatggtggatacataaacctacacatgtggcacaactgtacagaactacatacacacacacgagaacaagcagaactggggaaatctgaactaagatccacggattgcatcaatgttgatatcctggctgtgattctgtaccacagttttgcaaggatgttacccctggggaaagctgggagagggtttggggatttctctgcacttggagggagagtccccatgaagagtgaactcaactgagtaaaagcaacagcagaacatgcgtgcagcttccctggggggctttaggtacctggaaggagacccttgagcatctgttcataagctcctgccacgggactcaggggcccagatagcagccaaaacgctaatcatgggacacatctctgctcgcttacctgccacgcagggagctggcacccgccctaggctaatgagtctcaccatatcttggggaatacctattcacagacatgcagtacagtaattatctggctgagaaatcgagaactttcctgagggaaaaaggaagaatttgctggccaggagcagtggctcacgtctgtaatcccagcactgtgggaggctgaggcaggaggatagcttgagcctgggaggccgagaccagtctgggcaacacagaaaggctgagtctctacaaaaagaaacaaattagccaggtgtggtggtgcatgcctgtggtctcagctagtcaggacactgaggtgagaggatcatttgagcccaggcggttgaggctgcagtgggtcatgactgtaccactgcactccggcctgggtgacagaacgagaccctgtctcaaaaaacaaaaacaaaaacaaaaacaaaaattgcctacattccctgacctccaccaacagaaacaaagccaaaccttctgagctggggcacacttggggcactggcacaacgggtgacagaattcggggtccgctgcactgacagtgtcctccgcatcctccaggtcctcctctgtccattccaacaggtaacgcacctggtgatggagagtaacggaaacaggaacacatcctcagcgtctttgcatgcacaatatcttaaacacacaccatcaaccgttcccaatcagggcccacgcttccttctccaaccccacagccatttataaccggcttctgctccctcatgaagccttcctcagtccttccacttcacagcttatgccagagattattttcttctatcataaaaaaggacaggaagattggtgctgcctcagggtgatggctttaaaactctagtcctagggctgggcgcagtggcttataggtgtaatcccagcattctgggaggcagaggccagagaatcgcctgagcccaggagttcaaggctactgtgagccatgatcacaccatagcactccagcctgggcaacagagcaaaactctcaaaaaaataaacccatcctggtcctagggcacttagtgagcacctcactccctcctccattaaaagtggaagatacgggcaggcatggtggctcacgcctgtaatcccagcatttggggaggcctaagcaggcagatcacctgaggtcaggagttcaagcccagcctggccaacatggtgaaaccccgtctctgctaaaaatacaaaaattagctgggtgtggtggcgcatgcctgtagtcccaccttctcaggaggctgaagcaggagaattgcttgaacccaggaggtggaggttgcagtgagctgagatcatgccactgcactcctggatgacagcgcaagactccgtctcaaaaaaaaaaaaaaaaaaaagtggaagacacagtcctttcaaagggccaaaggcaagccaggggaacctgtccgtcagaatctaaggaaggctgtctccaatgtccactcatttcactgtcagatgtacctaatggttaggaaagacgccttccttcaagccacgacattctctccaggtgccagcccagggctggcggctccatctttatccagatacctgcttatgactcctcagagcctcaagcctcaggccccctctcgtggcccaggagtcccagctgaccacagcttctgcagaacctcacaaacaccactgggctctgccttcgcctctctacttcctcctctccccaagacgctgccctctcttaaaaccaagctgccctccttgcacactggctagtgggcctgggctctgagcccacactctgtgcctcggacatggtctctggtcttggcaacgtctcatcacactcctggagtatggacatctgaaaggcagggcccacactcgctatgtgcctgtatgttgatctgcctcattacttgtcaggaaaatataacaacaccattaccaaatatgcattaaacatagcgccctctgcacaaaatcagagtccacatggcccgaaactgaaccggagacaagaaacacaggtgggtggctgttttaagctagaacaagctttttataataaaaagcacttctaaagctgggcagggtggctcacacctgtaatccaagtactttgggaggccaaggcaggagaatcgcttgaggccaggagttcaagatcagactgggcaatatagcaagaccttatctctacaaaaaatttgtttatgattagccaggcatggccgcgcacaactgtggtcccatctattcaagaggctgaggcaagaggattgcttgagtccaggagttcaaggctgcagtgagccatgatcacgccactgcactccagcctgggtgacagaacaagaccctgtctctaaaaaataaaaataaaataaaaagcacttctaaaaactcaccatttctagatctccatcagcaactgctctcaaaagtttttctaccttaataaaaggaacaagaatgttagaaaaatgatttcaacaataaaataataatagaaataatataaacattctgaaaatctattggcttgatttgtggacttttaacgtctgatttagttttttttttttttttttgagatggagtttcgctcttattgctcaggatggagtgcagtggcgcaatctcggctcaccgcaacctccgcctcccaggttcaagcgattctcctgcctcagcctccctagtagctgggattacaggcatgcaccaccatgcccggctaattttttttgtatttttagtagatacagggtttctccatattggtcaggctggtctcaaactcccgacctcaggtgatccgcccacctcggcctcccaaagtgctggcattacaggcgtgagccaccacgcccggctgatttagtatcctgtaaatgtgtccctaaaactgctcagggagggcatcctaggaagttgctggtgtgcgcagaacccactgccatttagggaataataaactgtaactttatcagtggaattgtataaatgtatatgtatatttatatgtatatacatataaatgtatatttatcagtggaaaggtgaggccatggtcgccttggaacacaagtccttcctaagacgccagccacccctatgatttagaaaaatacacttagctaagtgcagtggctcggcctgtaatcccagcactttggaggcaatccccaggagtttgaggttgcagggagctatgactgtaccactgcactccagcctgggtgacacagtgagaccgtgtcccaaaaagaaaaaaaaaaaaaaaaaaaaagaaatactgaactcagctatcagtatctgctagctgggacaccatgagggtggacacccctcccagggacaacttcaggtctccgttagactctggaccatgtctcttggctgtctctgctatggctttgcatggagctaagctcacttggtcctccaagagcatgtcacggcttgtgggtagtgggacactatggtagggtcagtgagggttcagcacccatgggggggccatcgaaggtggtacatccattcaacagtccactcctcagctaaagaatgaggcagatctggccgggcatggtggctcacgcctgtaatcccagttacttgggaggctgaggcaggagaattgcttgaacctgggaggtggaggttgcagtgagcccggattgcaccactgcactccagcctgggcaacagagcgagactcttatctcaaaaaataaaaaataaaaataaaatgatctgaaatcagcggacttctacatgacctgacttgtcttcttcttagcctatcctctctttaatacacaaacgcactctaccacactaattgctgctcagggagtggtccatgaagggcacaccaaaatatacagcaccgcgagatgctgctgggcccagcttgaaggcaccaacctcggccaccacagagcagcagcggcctcagcatgggcaagcaggctgagagggcggcccttgtcaggccacggctcttcagctggacaccactgcccagggccgccaaggcctcccctccccagcccttcctctggaagcctcacctctctgtagtccttcttggtctcctcctgccttgagctggctgacatggaggagaagctggaagtggaggactcttggctgatggagtccacggagcgctgcggggactgcacaggggcctgcagccaaggagccccaacgagagagaggacaggacacaaggacacgtgaggaccagagaaggcgcccttggtctccaaggtaacctgacctgctcagcccggctgacttacctcggacgacttctgcctcctctcgaaggacaggtgataggcttccattacagacagaatctagggggacaagggggatgccaacagtaccccgtgagatgggggtcgtctcagcacagtgccatcacccacacgccccactgccggcctagctcctcggaatgtcagtgcagtgagccttaggtcacgtggcccagtcgcacccttggatagacagaaaaaccaagacccagagcaggtgggaacttacgcacgatcaccccgaagtcggggcttcctcccttcacggctcctcctgtcccgtgggagggctcagggcttcccacgcatggacgcaagggataagagaagccagacccgcatggagcctgaaaggtgactgcatccagcccccaggcctgtctgtccacaggcatgaggtgtggcctttcctctagcacccacaggtctcaagtaggaacagctcagagccaagccgagaaggcagcctctcttttcctctgcagatctccctctggaagggcctttggtaaacaaacgccacggcaatagaaccctcctcccaagacatcccagcagccccagccgtggtggcactgctcagcccagtcagctctgcctgccagaaagctgcgaccttggcagtattcagggggtacagccggaggcccctgaagccagaaacagggatctaacccttcacaaactgtgctttactgtagttcttatgctgtgtccctgccacacacacacaaaataatttaaaaaaaaaaaaaagagggaagccgggcgagatgacccataactgtaatcccagcactttgggaggcctaggtgggcagatcacttgaggtcaggagttcaagaccagcctggccaacatgatgaaaccccatctctaataaaaatacaaaaaaaaaataaactagctgggcttggtgacacacacctatacctcccagctacaagggaggctgaggcaggagaattgcttgaacctgggaggtggaagttgcagtgagccaagatcatgccactgcactccagcctgggcgacagagcgagactccgtctcaaaaaaaaaaaccaaaacaataaaaaagaaagatgaaagcaggggcggtggctcacacctgtaatcccagcactttaaggggccaaggcgggcagatcacttgaggtcatgagtttgagaccagcctggccaacatggtgaaactccacctgtataaaaaatacaaaaattagccgggtgtggtggcgcatgcctgtagtcccagctactcgagagctgaggtgggaggatgccttgagcccaggaggcagaggttgcagtaagctgagatcgcaccactgtactccagtttgggcaatacagccaaaccttgtctcaaaaaaaaaaaaaaaaaaaaaaaaaagagaacagaagtaaacttttggaggtgatggatatgtttatggcgtagatggtggtgatggtttcatggatgtccactcttctctaaactcatcaagttgtatacactgactatatacagctttctgtatgccaatcatgcctcaataaagaggtttagagaaaacaaaaataaaaacaaattcaaactgtgctactccaagaataagatgtgaacaaactgaaagaacaacctggaagagctggaaattataaaagggagcagtaaaacatcaaaaggcagaaagctggccaggcgcagtggctcatgcctgtaatgccagcaccctgggaggccaaggtgagaggatcacttgaggccaggaatttaagacaagcctgggcaacacactaagatctcatctctattacttttctaaaatcatatattttggggctgggcgcaataactcacacctgtaatcccagtactttgggaggccaaggtgggtggatcacctgaggtcaggagttcaagaccagcctagccaacatggtgaaaccccatccctactaaaaatacaaaaaattaaccaggtgtggtggtgggcacctgtaatcccagctgctagggaggctgaagtaggagaatcacttgaacctaggaagtggaggttgcagtgagccaagattgtgccactgcactccagcctgggcaacagagcgagactccatctcaaaacaacaaaaaaaattaaatatttttgtaaaaaggcagaaagtcaggcctgtacaaacggggctcccctagagacctggagtggaacagaatccctcaggggagcctcagcttgcagatattctggacgtccatgctggggtctccatttcacagggccctgtgctccccctggtcagtctgccacatgcctctctaacgatgccattcaccagctctgctgccgggagacgagagtgcagagaactggcctctgcgagccacctccaagccccactgactcacgagaggggagcacttcacaacatgctccccaaactatgtctccagaaattactaccagaaaaaggtgagctcattaacaaattatgtatgaaagaaaccacactcgatgtccagaactggccgagtctcaataaagactctaggcattgaaggtgaagcaccgggaaaaaagagttccaacacatcctgctccctccccagtccctgcccctgcggagcctcgtttctacccactccatttgccaataaatcaatagcactcggcagccagaacaaactctgcctgcaggagttcctggaacaaccctgagaaaaacgcccactcaaaccaaaaataatatatcagtaaaacccattaatgatgacgtcccacatgcggcagaaagggtgcaagccaagttctgccctcaggcaataatgcacaatttgtctagtaggccaagacctaagctacggacatcgatcttctttcgaagtcatcttgcccctcagagatgggaagagctacctttgagtttaatgcacacttgaggggcgtctccttcagtctgttctggatctcggtggacgctccgttctgcagcaatgtctctatgacgccttggtagccccagcgggcagcaatgtgtagaggggtgtctcctttctcattgccaatgtcaagtctgcacgactccacgtcgtagtaaaccagagccttcacacactgcaaagagatggggaaatggcatcgctcatggatgtaccaagcctcgacaaggtccgtgctctcctcgacctcctcaccaagcaaatgtgcagtaacagacagaactcagaagtgtcacagtatctgatcaggacacctcattctcattcattttttttttctttttcttttttgagacaggatctctctctgttattcaggttgcagtgcagtgatgcaataatagctcactgcagccttgaactcctgggcttaagcgatcctcccacctcagcctcccgagcagctgggactacaagcatgcaccaccatgcctggatggtttttttttttaattttttttttttcctgtagagacagggtctcactctgttgcccaggcaggactcaaactcctgggctcaaaaaatcctcccacctcagcctctcacagtgctggaattatagatgtgagccactgcgctcagccaggacacctcatgctttcaaaaggatgaaactgccaatcaataagaagtggctgcaaaaactgtgatgtctccatgtacagaacagagttactacagcaggcctgagactgctaaccactgagaggcctgcttgcaagactgcctgttggcctgaaacattctatgggtgcctggatgtggggagtgttcccaaaattccctaactgattaggtggctcacactgggcctgaattgttttatacaatgtggtttatgctgaacgcccgagtttcttctgggagtatggcattttggtacatgctgtccagaaggtgcttacaggactagccttcattaactcttggggactgagttcctaatgagcttcccgagtggaccacacttcctgtgtgttgttccaactcactgctggaagaactgagcccatcctgtgtgggtccatgaaaagagacctgttgttttttttttttttttgagacacagtctcgctctgtcgcctaggctggagtacagcagtgcaatctcagctcattgcaacctccgcctcctagttcaagtgattctcccacctcaacctcctgagtagctgggattataggtgtgtgccaccacacacagctaatttttgtatttttttagtagagacagggtttcaccatgttggccaggctggtcttgaactcctgacctcaggcaatttgccggccttggtctcccaaagtgctgggactacaggtgccagccactgtgcccagccgagagagactgtttgaagctcacccctgctctcctctctggactccaccacgtgcctgttccctttgctgatgttgttctgtgtccttctgctgtaacaaaccacagctgtgagtgcgactatatgctgagttctgtaagtcctcccagcaaatcactgagcccaggggtggtcttggagaccactgacacaacacacgatagatcactgcagctattaaagaatgtgctagatggccaggcacggtggctcacgcctgtaatcccagcactttgggaggctgaggcaggcggatcacttgaggtcaggagttcaagaccagcctggtcaacatggtgaaaccccgtctctactaaaaatacaaaaattagctggatgtggtggtatgtgtctgcagtcccagctactcaggaggctgaggcaggagaatcgcttgaacccgggaggcagaggttgcagtgagccaagatcgtgccattgcactccagcctgggcaacagagcaagactccgtctcaaaaaaaaaaaaaaaaagaatgtgctagatcaacagggactgacctagaggatctctgtaacgtagagctaagttaggaaagcaagtggcataaaagcatacagggcatggtgtcatcttcatacatcaaccacctggccaggcctgagccccacacacgtgtgtaaatctatccatatatcactatggagagaagccagaaggagggcgggtaggaaaaaataagcacatagtggtgaaacaggacgtgaaaatggaaattacgcaattcttggatatcattataaaagtgaaccagaaatggtggctcatgcctgtattcccagaactttggaaggctgaggtgggaggattacttgagttcaggaatgtaagaccagcctgggcaacatggcgaaaccctttctctacaaaaatataaaaattagccaggcatggtggtgtgtacctttagtcccaggggaagctgaggtgggaggatggcttgagccaggaggctaaggctgcagtgagccaaaatcatgccactgcactccagcctgggcaacagaacaagatcttgtctcaaaaaaaatttgtttttctaattttaaaaagtaaaaaataaaggccaggtgcggtggctcactcctgtaatcccagcactttgggaggctgaggtggaagatcacctggggccaggagatccagaccagcctggccaacatggtgaaaccccgactttactaaaaatacaaaaattagctgggtgtggtggcacacacctgtaatcccagctactcgggaggctgaggtgggagaatcgcttgaacctggaaggaggaggttgcagtgagtcaagatcccatcgttgcactccagcctaggtgccagagtgaggccctgtctcaaaaataaataataagtaaataataaaaacagaaaatgtaaaaattgaatatgtacacaagtaagaaccagacggtagcaaggagaaatgaaaatgatttgacttcaggataagataatgagtgacttgttttaaactttgttacttcaatatggcatctgtaatatattaaacattctctttttttttttttttgagatggagtctcactgtcacccaggatggagtacaatggtgccatcttggctcactgcaacctccacctcccaggttcaactgattctcatgcctcagactcctgagtcgctgggattacaggtgcccgccaccacgccctgctaatttttgtatttttagttgagatgggggtttcaccatgttggtcaggctggtctcgaactcctgacctcagatgatctgcccacctcagcctcccaaagtgctgggattacaggcgtgagccaccgtgcctggcctaacattctttcatattaaaaaaatttacacacccaatgttccaataattatcgacacaaaatacattaatgagaaatcccgacttctctacgagtgggaaagggtgaacgcagcccccccggaacagcaagagccactcacgtcctcgtggccgtaggtgcaggccaggtggagtggcgtattcccattgttgtcctgcacttccgcgctggccttgtagtgcagcagcagcagctgcggagataaaggaaagcgatgagcagggcacagccggctccctgggaggcccggcctccagtcttagcagggggaggtcatttgctcccatcttcgatcttatttatgctactattcaaattaaaccaacacccatcattcctgacacttgagagactgaagaaaaaagtctaaagccccaccttttcttcccccatatgatcaggaagtttttctttttagagaactcagcctgtctcccaggctgaagtgcagtggcacgatcattgctcactgcagcctcgacctgctgggctctggcaaacctcctgcatcagcctctcaagttgctgggactataggcacacaccatcatgcccagataattttaaaaaaatattttttggtagagatagggtctccctaggttgctcaggctggtcttgaactcctgggctcaagcgatcctcctgctttgggctcccaaagcactgggattacaggcgtgagctaccacatctggccaggaagtttcaaatctaaacctaacgatcttgtccaggagactcagaaagtcttcccaggagaccccgggagtccttggactccctgactactgctgcagcagagctggtgtggaacgaggggggcacagcaccaggagacaggggtgcagggtagccagcatgaccgtacagtcaccacgcagaaccaagctcacaggagcaaagcgacagcccgccacaaaggcaccactgctcaccgtcacgctctggtagcccttctgacaggccaggtggagcggagtggctccatggtagtctgtggcatttaccatggcgcccttggaaaccaggaggtcgatgagggatgcctgccctgcagagcagaaggacgtcacgatggagaaggaaggcgcagaggccttccacaccttaactgtaaaaccacaacactattgcaccctcctagtcctgggcatgaaacccacggtagatactttttctgctagagaggaactacagctaatataaagtaaggctccgcagactccagacatgttggggtgggccttggaggggacccagcaaaagtccacctctcagcaataaacaataatggaaaagagacttagacttccacaggctccatgactcatcagttcataagatggagtattatgcagccattaaaaaatactgacaagtaaacatattcttgcatagtgctaggagaaaaatagcacacaacagaatattatgagccctagagcaccacacactttatgcgtccacacatccacacaagcatgcagacaccccagacactcatcaatcacaacgatctctgggagacagggatggccggggactctggaggaccttatgttttctatcttgaatgtgcactttattttatttatttatttatttatttatttatttatttatttatttatttattttttgagacagagtctcactcagccacccaggctggagtgcggtggtgctatctcagctcactacaacctccaccttctaggttcaagcaattcttctgactcagcctcccaagaagctgggattataggcgtgaccaccacaacaggctcatttttgtatgttttgtagagacagagtttctccatgtcggccaggttggtctcaaatgtctgacctcaagtgatttgcctgcctcggcctcccaaagtgctgggattacaggcatgagccaccatgcccagccaaatgtatactttaaaagacaataataatatttttttaaaggcagggccacaagaactgcgagctgacgattctgagaccgttctcatagttcagattcaagccttcccttgctgggcccccagcctgcgggagcgttaggcagtgtttccatgccgtgggacccacgcaggggggctcagccagcgcaggaggcagcagggtggccgtcgaggcctgtggaacgtttgctcctcttctccttccggcccttggagggtggacccacgatgcagccccaactgccaacccccacccagcccatcagccaggcctctctgctgggtcaccttgggcaccatccctttgctgtgacagcccctaggggccagcccaggaccacataccacagacagcagccacatggagaggggtgtgccccctgtcgtctctggagaatggagtgacaactgagggatcattcaacctcctaaaatacagaaagagatagaaaactacacaggggaatggcacagcaaagcctctccctgaccaggtagataggcaggtaccacagacagaaggcggctcacaggatgccacccaagagatgtgtgtctccggcactgtcccagtgctcacccagcatgaggaacagaggcacctggccctggagtctctcccccaccaaccctttaggcctccacacccagcaaaatagcctgacaaggataatgggaaaccaaaaatgttactgggaaaaactgacattcctcccatcctaaaaccccctttctgaggctggggcaggccctataaccagcctaccctggcagccagcccgccagtgagcaagtgctttgacaacctctaacctatctgattctccaaaggggcagctgttatcatctccactgtacagcagaggcagctggggggcagggaggacagtccttatctgcagtcacacagcgcacagtggagaaggtccaggaggcctgtctcctgcttcctggcactctgagcctccaccagcaccctcttacccagagacgagtttctcacagtcatcgcagaagcagagagggtgacacatcttttggacggtatctttatcatggtcctcttggctcagaagtctctccacttctttctggttacctgatgcaatgtgctgaaaagtgacatccaagatgctatccacatgctggaattactcaattattaggagtaaattttttgagagtcctttttggtttttttgagatggagtctcgtcctgtcgcccaggctggagtgcaatggtgtgatctcagctcactgcaacctctgcctcccgggttcaagccattctcctgcctcagcctcccaagtagctgggattagaggcatctgccaccacacctggctaatttttatatttttagtagacacggggttttgccatgttggccaggctggtctcaaactcctgaccacaagtgatccacccatctcggcctcccgaagtgttgggattacaggcgtgagccaccaaacctggccgagagtccttttagaaatgctcatctatgtgtttatggatgaaatgatttgcactctggcatttcctttgtaatcatcttggtggtagggaaagtaggtgaggagagatgaaacaactgcacaatggtggccggctcattctactactctatttctggaaatgttaaaagtttcccataattaaaaaaacaatgacatgcctggagcggtggctcacgcctataatcccagcactttgggaggccaaggcaggtggctcatttgaggtcaggagttcgagactagcctggccaacatggtaaaaccttgtctctactaaaaatacaaaacttagccggatgtggtggcagacgcctgtaatcccagcgactcgggaggctgaggcaggagaatcacttgaacccgggagatggaggttgcagtgaaccaagatcgcaccattacactccagcctgggtgacagagtgagactctgtcacaaaaaataaaaacaaacaaacaaaaaaacaacatgacaaaatccataaagcaataggaatggcgggcagacaacacatctctgaacatcagtgtggattttgccacctcactagaaaaagcctcagccctgttcctcttgtgttctttttttttttttttttttttttcagtgaatccctacagggtgacaaataacagaatttatttatttatttttttagaaacaaggtcttgctatgttgcccaggctggagtagagtggcacaatcagagctcactgcagcctcaacctctcgggctcaagtgatcctcccaccttagcctcccatatagctgggactacaagtgcacaccaccatgcccagcttcatcttgttatttttttatttattattatttttatacttgctatggactaggggatcctcttttattctaatagagcatcagcctgtaaaggaaagagaatagctgcaatgagcaggaaaccccatcaacacacaaacctgcagagctcacctggtgcttcctggacgtgctcattccccaggacccactctggctccaggtcgcctggaagcacagcagcctcccccagggggctctgccctcgcccagcactcacggactgccctgcgggcacctcagcggcctgcctgtggccagtgtctgagcagggagctgcccccatgtgccaggtgaccagaccaccaggaagtcaggcaccgtgttcccaacccagtgcacacgcccataaacatctgacaacgggctcctcgagcccagcggaggcatcagctctgccagggctgccagcggaggcaccactgagctggcctggaggaattagtagtattgcgaggaactgagaaagcaagaggcctggcctgcgcccacagtgtgccgcccagcacagctacagcacagcacgctgggggaggtggggaaacatgccgctctcactctgccacctaggctggagtgcaacggcacaatcatagctcacggcagcctccaactcctggcctcaactgatccttccacctcagcctcctgagcagctaggactacaggtgcccgccaccacacctggctaatttttgtattgttttgtagagacgggtactcatgatgttacccaggctggtctcgggcttctggcctcaagtgatcctcccacttcggcctcccaaagtgctgggattacagaagtaagccaccccacctggccttgatcccaaatttaaaacctcagcattcctactgcccattctgagcacagaatggaacttcagggtttatgcagaccaccaccctgatcattttttttttctttttgagacagagtctctctgtcgcccaggctagagtgcaatggcatgatctcggctcactgcaacctccaccttctgggttcgaacgattctcctgcctcagcctcccgaatagtgagactacaggcatgtgtcaccacacccagctaatttttgtatttttagtagaggcggctgttgcaccatgttggccacacttggccttgaactcctggcctcaggttatcacccacctcggcctcccaaagtgctgtgattataggcatgagccaccatgcctggccaaccctgatggattttatagaggcaccaagagatgcagtgttcctcacccacatttacccacagagatgtcttggtatctcaccttaaacaggcagtcggtgggagacgaagtcatctgagagagtaagctcattctctgcttaaggaacagcctgtctccaaatccctcagactcctgcagggaaaaaaccaaacacaccacgagatgtcagtgcagatccttcaaaacccagcacctcagcaacaaccccggctgtctcttcagagcagtatcggctgcgcctctctcccgtctcatatgggacctgctcactgagacggaggacgggctgacgtcaggtggggagaaggcttcctggaagtggaggctttgacggttgctccctgtgggggatggggatggtggcggcaccctgactgcgtgtatatgtggaatgtgccatctccagcgtggaatgcggcgcacacacaccattgtcctccagatggaaactcacattgccgtggcctcccttcctcctcaagcctctgaccaaatgcctgcagagcccaattccctgctgtcttatctgaggcctttgggcaggaaagccatttcacaagctggtctcaatttcccactgtcaaccagcaggagagagaggggtcttgctttttggacgtgcctattaaataatatggccacatggccaggcgcagtggctcacacctataatcccagcactttgggaggctgaggtgaacggatcacctgaggtcaggagttcaatacgagcctggccaacatggtgaaaccaatctctattaaaaacacaaaaaattagcagggcatggtggtacatgcctgtagtcccagttacttgggaggctgaggcagaagaatcacttaaacctgggaggcagaggttacagtgagctgagatcacaccactgcactctagcctgggtgagagagcgagactccatctcaaaaataaataaataggccaggcgcggtggctcatgcctgtaaccccagcactttgaggggccgaggcgcgtggatcacttgaggtcaggagtttgagaccagcctggccaacatggtgaaacccctctctactaaaaatacaaaaattagccgggtgtggtggcgggcgcctgtaatcccaactactcaggaggctgaggcaggagaatcacttgaaccccgcaagtggaggttgcggtgagccaagatggtgccactacactccagcctgggtgacagagcaagactccatctcaaaaaaaaaaaaaaaaaaaaaggcaaaactctagatactttccataatactttatgaaatcatttctcgcaagacagttcaatgcttccttgagcacctgcaaccaaaccatgtaatgacaaattcgcttcctgaaaagggtcttggtgggaagtcaagggaattttctccagccagcggctgccagaaaacccccaaaccctgacaaatttgtggaataaggatgtctctttacagccctctaagttttgacttggaggtccacctaaagatagagctgacagcatctctggggataggccattcctggggtcctctgccatgcagggtcctcccagcagtcccccaggagggttaacttagcaaatgaacagcagcacctgtgagaggcacttctgcccccagctgctgtgtgccatataaagctctaacaatccactttacaccgcaattcacagctgaggagcttagggtcagagaaacatcacacattgttatccgggtaaatccagcactctttccgcaactctggttaacgatttagacagcagtgatgaagacaggtaggtctcccaagactgaatcttcagggaagaatgagctattggaagagagggggtatcagcaaggacttactaaagaaatgggtaaatcctttctatgagaaacccagtaacgtaaggaaggccagaagcatgcaaagctgcagacaagaatggtacaggttctttcttgtttttttatctgtttttttttttttttttttgagacggggtcttgctctgtctcccaagctggactgcagtggtataatcatagctcactacagccttgaactaccaggttcaagtgatcctcccaccttagcttcccaagtagctgggactaaaggtgtgccaccgtgcaccgctaattttttgtaaagatggcggtctcgctacattgcccaggctggtctcgaactcctggcctcaggtgatcctcctgcctcagcctcccaaagtgctgggattacaggcatgagtgaccaggcccaacccagattctttcaaagttctctctttttttcattcacaaaggtaactctagagtcatcccagtaatttattttcagaaagctgaagtcttcatttatgaacatgcttaaagaatgttgagcaggtgtggtggctcatgcctgtaatcccagcactttgggaagctgaggtgggaggatcacatgagcccaggagttcaagctcagcctgggcaaaatagcgagacctcatctctacaaaaaatttaagaattaaaaaattagccaggtgtggtggcacacacctgtagtcccagccacccaggaggctgaggcaggaggatccctttgagcgcaggagttggaggctgcagtgagctaggatcacaccactgcactccaccctgggtgacagagcgagatcctgtctctaagaaaaataaaagcttatggtcatctcaagtatattttgcagagaaaatttccatgaaactatattatataaaatcaatagtaaaatctaactggatgtcctcatatttagtccttaatacttttcagaaacctcttctgctgtgaggagatacacttgggatttttccctaggaaacaccatcaatacatagcaatgactctctacattcctaaagggaacttcattacttaaaccagtgagcagctaagacagaggccatgatacagacagaatcacaacaacaaggaagccacgacgcctgctccgtcaattacaggccacagtaaatatacgagcatctctcaatacctgcagggtgggcttcacagccagccgtgaggatgatgcatacctgtctcaaggtttcaccagaaccaaccatactccatccaggagggcagaaccagggtccaacaccctgacaacaagaggggtgccttgggctgtgaccctccctttcccatccaaactaaacactatccttaggggcatccttacaccccagatgcagagacaaacagacatgcccaagacatctgagcctataggagtggactcaggctgggcgcagtggctggtacctgtaatcccagcactttgggaggctgaggcaggcggatcacttgaggtcaagggttcaagacgagcccagccaacatggcaaaatcctatctccacaaaaatacaaaaattagccgtgcgtagtggtgcgtgcctgtagtcccaggtacttgggaggctgaggcaggagaatcgcttgaacccgggaggtggaggttgcattgagctgagattgcaccactgcactcccgtctgggtgacagagcgagactcagtctcaaaaaaaaagaaagactggactcaaaccctcaaaccaacaccagcacgagagaaggaacctctcaaatattactgccaatgtgcctgcaatattttctgaaataaaaggaggtgtgagaagccgatgtatactgtttggtcagccacctccttacaacctggtgaaggcctccacagaaaatgagaaagcagaagacagccacgctacagggagcagcaaggggatgggagcatctttgagaggtggacacctccttccaggtgaccagagacaccctgggcccagcaaggcacagcagagtgattcctctgcagggcaggaaagccggccagggagtgaactctcagaccaatctgtttcttgccctgcaagaaccagagggcagggcaaaaaccaccgcaggcacggtgagagaaacacaagttcccacagcctcatagaaaacaagtcaaactcacaactcttactccccagccttggaaatgaacagaaattctgatctgcacacacgcataggtagagacacaagagcacacacacacgcattcttttttatttatttatttatttgtagagacaaggtctcactatgttgcccacactggtctccaactcctggcctcgggtgatccacccgcctcagcctcccagagtgctgggattataggcatgagccactgcacccagcccacatacatactctagaatcttgctgatttccccctaaatatggaaacaaggcagaagaaagaaacttttcagaagagccacagccagccacatccgagatgcgatggatgacccccaatttcactggcagctgagtggggtgattaaatcagacttcagagaagagcagagattaattcttcaacaagtacctgaatactgtcaacgagtacagcgagatcatgatctaaaattttggttaaaaagataactgtgttcattccttgttaccgccaagtcacgtggaggcagaggctcaggtgtgttcaagattcagctgcgtccgtgacccaccgccatagccaaggaaggcattgtactgctacacctgtgacccactgccatggctgaggaaggtcttgcactgctgcacccatgacccacaaccgtggctgaggaagacattgcactgctgcacccgtgacccactgccatggccgaggaagacactgctgctggcggtgtaatggatgttaacactgatttacaaggggtgctgaaggacgccttcatccacggtggcctagcacatggaattcgccaagctgccaaagcctcagacgactgctgagcccatcttggtgtgcctgcatccaactgtgataagcctgcatgtgccacattagggagaccctaggtgctgaacaccaggtcaaactaattaagattgatgacaatgagaaacgaaaggaatgggtaaggcctctgtaaaacgacagagaggggagaccctatgaaggggctagctgcagctatgtagcagttaaggactttggcaaagaatctcgggccaaggatgtgattgaggagtgcttcacatgcaagaaatgaacgaataaaatgctggctcacatgcctcaaaaaaaaaaaaaaagatacaattgtgtatgcacagaaaaaaagacaaatgctaaaatattaataagtgtcacccctggctagtaagtttatgggaagtttttgttgtcttcactgccattttatagactgcaaatattatttgtaagcaaatattagtcttctaattaggaaaaaattaagctattcttttgggaaaaaaacagttctctctctctctctatatatatatatatattttttatatatatatacacatatttgagacagagtcttgctgtgttgctcagactagagtgcagtggtgtaacctcagctcactgcaacctctgcctcccggattaatgcaattctcctgcctcagcctcccaagtagctgggattacaggcacctgccaccacacccagctaattcttgtatttttagtagagacagggtttcaccatgttggccaggctggtctcgaactcctgacctcagatgatccacctgccttggcttcccaaagtgctgggattacaggcgtgagccaccgtgcccggcccagcacacaatataatttcaattatgtaaaatatacatgggtaggaaaaagactgaaaatgcatgaacgtgtcaataacgaatgaatggggtggaaatgcctgcacctgagagcacctggacaggctgatgctgtctcccagacgctttagctcatcattattttgggagattctacatcaaagtctgacaaagatgaatgttcaatccttggcactctcaccttataatacagagatcttttcattttatagatttcaactttgtgatttctgtatgatcacattttactcattggtatgtagtaaaacaggccagcaggacaaccatggttcaagattctcacgattcacatagaaatataatcacatcccctcgccgaccccagccaatgctcaataaaaaccaaggaaacaatggcaaggccactgagtcctcaaattgcacacattaatggtctcacagatggcagtggcagcccatcgggagtggctgctgcaaagacgtaagctgcagtggaggaagcgcggccaggtttgtgcactctgcagggccaacaggagccaggaacaggcaggagcccccatctcctactgagctggcagggcgggagccctgcactcccaggcgcagctgcagccgcccagccgcagctctggatccaggaatctctgcactctcaggggcccaggaagcatccctgccgccgcaggctcgtaagtgcctgctcccgctcctccccactcctggcaccgacttcaatttcagagcaaagctgaggccaagcccgggtactgttgcaacccagccatgtgtgcacatgcttggtgtgacactgacacaccagcctcctgatgcctcagacccctccaagattttgggcgctgatgagcatgggagagtagtcaaggtaggggctgagggcagctcagtgcaggcctgcagatgccccttggcacaaacagcctggatgcactggccagcatgttgatggtggcagaaggcagacacgcttctgggtggaaaggtgcaggtgcccagtgaagccccaccttcaagacagggacagcctaaagcctgggggccgggctgtcagtcccaagtggagtccacgacccagactgagaactcatggtgctttctccaggcccacctatggaccaatcagcacatactccctcccttctgagccataaaaaaccccggactcagccagactcagacagatgtcgggactaccaactgcaggaaggagctacctacgtcaggcctctttaactcgtcaggacgacctgcctgtggaaagaagctgcccactgtgggtctcctgagagctattctgccgttcagtaaagctcctctctgccttgctcaccctccactagtctacgtacctcattcttcctcgacatgggacaagaactcgggacccaccaaatggcaggactgaaagagctgtaacataaagagagctaaaacatgctcccgactcactacattgcaggtgacgagaggagagaagagctctggcccttcagggagcccaacctaggagttccccgagccagggctatgacaccctctttggggctctgcagttcctggtgtctccaagcttccaggccccactgtgttccccagtgcccaccgtggaagcggcctacagtacgcctgctctagctgcagccttgcatggagcaggaccctgtacaagcaacttggagctgcccaccccacctcagtcggcacacctggttgtgtgcagtggccagaccctgcacttgctcacatacccctcgccactccacacctggctcgcccttggcaggcatgggatccaggccagtagcacaagccgagcgcagcctgccaggccaagagcgtgaaatgagcccagcaggcccgaacaaaactcaggcaaaggagccaccagccacagaggtttccggctggaaaagcgacagtccagggatcccgtgacatcacttcttgactatcaaggtcaagaaatccaaattccctacttctggcttccctttgcacccacatgtctttggagaggatggggactaatgaagtaggatattaacaatgtaaatcccaatgataacccaccaatttttaccaccaattgagggcttggtgttctcttcactgagtgatttttaagactcacagccctcaaacagctgaggccccattcctgggaggcaatttaagaatccgtctgcccacataccaaccccagcaccctatcaagggaaccatgatgcccacaaaggaaggccagggcaggggtgagatcttacagggggtttagcagagaggcttccttgccgaatatattcaatggcagcttcgaatgaggtcaggcagtatcccagttcatcctttgccaagctgctaaacctgaagtttttgatgtaactcaaatttgccatcctaatgaaaggaagaaaaaagttatgttgttgtctatccaagtcacacttctgcaaaaaaaatatcattggcttgggcaactgatcaaatatctagtcagttggttcgctcaggaagctacgaccaccatcccctggatctctctgcagagtgtgtgcgattaggaacacaagtaaaatgactagctagttccctgaaatagtctttagcaagctgattaccgtaaactgagctgtgggttccaggggagagattatgggttttggggccagaaagaatggcaatcagctttctgctcaaccactgtctagacactcattccagaacaagaaatgtaagctctccgggccttggtttccccatctgtaagtggatggatgaagcaaggggaggccccacacctagctcgtaacaggtgtccaattgaagatgggcttttcctagagttacattagaactaccacagtgcagtgctgccattttttttttttgagacggagtctcgctatgtcgcccaggctggagtgcggtggcgcgatttcagctcactgcaagctccgcctcctgggttcacgccattctcctgcctcagcctcctgagtagctgggactacaggtgcccaccaccatgcccagctaatttttttgtattttttagtagagacggggtttcaccgtgttagccaggatggtctcgatctcctgacctcgtgatccgcccgccttggcctcccaaagtgctgggattacaggcgtgagccaccgtgcccggccaagcactgccattttcaaaagagtatcttaaaagaaaatgttaccaattagggatctccgttttcacaagcaagtataacaggactgatagcagatcatcagcacacatggtctccaggttcactgcaaaggggaaacacacattcaatgccatcatgagattcaaatggactgacaagcatatcaactccctaccaccgcacaccttgtgaaaccacgtatcagggagatcatacactgggggagaaatgtcattgcacaagctcctttacagcgtcctgatcagatgtcaggtccagggggaaaagaatgcccagcaatttcagaacatgaccaaaacaaggtattagtaactctagccagatacggcagcacgtgcctgtaatcccagtgctttgggaggccgagacgggagaattgcttgaggccaggagtctgaggccagcctgggcaatatagcaagacccccacctctacaaaaaaatatgaaaattagccaagggtggtggtgcatgcctgtaatcccaggtacttgggaggctgaggcaagaggatcacttgagcccaggagttcaaggatgtagtgatctacaaatgcacccagcctgggtgacagagtgagaccctgtctcttttttttgtttgtttgtttttgaaacggagtctcgctcagtcacccagactggagtgcagtggcgcaatcttggctcactgcaagctccgcctcccgggttcacgccactctcctgcctcagcctcctgagcagctgggactacaggtgcccgccaccatgcccagctaatttttttttgcatttttagtagagacagggtttcaccgtgctagccaggatggtctcgatctcctgacctcgtgatctgcccgcctcagcctcccaaagtgctgggattacaggtgtgagccaccgcgcccagccgaccctgtctcttaagaaaaaaaaaaaatatgttaactccaagcagaccatgccttgccacccccttggacgctgaaagagcccagggaggtggcttcagtgataaaaaatgaagatgagcccagagccatcacctaaagtctctttcttcctaaagtcaccaaggtccttcctaaggtcacttccattttatagacatggagtccactgcccatgtggagtttcactttttttccattttgaaattttaagtaattcattcacatttaaaaattcaaacaatacaaaagagcaaactgtgaatgttcctcccatccctgccagccagtctcttttcccagaggctcctgctgttgcttcctgcacatctgtccaggacagctatgagctcaccatcatatcgtggctaaacagctatcccccattctttgatgctgttggctggaagtctaccatatgcattcctgtttatttcattccatacactcaggatcatcccttatctacacatacagctatgtctcttccttactgactttttcttgacttgttttcttttacttcttcttttttttttttttttttgagaaggggtctcactctatcacccaggctgtagtgcactggtgtgatcatagctcactgcaacctccaattcctggcctcaagtgatcctcccaccttggcctcccaaagcactggggttacagaggtgagccactgcacccagccccataaaaatcccttaagacagcatcactctttgctttttcatctggatgtagcatctaccccttggccagtcccctttccaagcacaaacctctctggcttggagactgtgtaatgagctgcaccacttttcgcaagcagacaagcttctgctgtggggaggtgcatttgttcagctgagccagctctcttttggcacgaggtatgttaaagctgtaaaataatttggaaagtgacaacttcagagcacagtaagagaaccctctggcctggatctaagaacacatctcaggatctacacttctcacaacaaaccagaaggaatgaaacacaaaaacagatactgagaagtcatctgactcaagtcagcggcaaaacagaagagccttcaatcccattcaggctgccaggtgatagagttgtacaagaaaagctgaaaaaaaaaaatcctattcctagagggaaacaacccaaagagggttgtggtaggtgaaacatttttgtgtcctaatgaaacttaaattaggctcggcgcagtggctcacgcctgtaatcccagcacttgtaaaccagggtgggcagatcacttgaggtcaggagttcaagaccagcctggccaacatggtgaaaccccatctcttctaaaaatacaaaaattagcagggcatggtagtgtgcacctgtaatcccgctactcgggaggctgaggcaggagaatcacttgaactcaggaggcagaggttgcagtgagccgagatcacaccactgcactccagcctgggcgacagagtgagactttgtctcaaaaagaataaaaattaaagaaatgaattaactcctaagtaggtatctctatggcaaggttcccttgggtgggcaggtgggatgtcccctgcacgcagaacccacatgggcaaattacatgcccacttggggaccagctgcacaaaaccccgtgcccagcggctcccatccagctggcgtgctggtgcagtgtgggagggggacggccacacacagtcacctataaagggcagccctttatctttggttgcaagtaactgcgctgctcctcagaactaaccacatcaaaccagcgtgtcacctctgccaccgagagggcctgcttccgggagaagacagcacccctgcctctgaggacaccaagccgctgtggcgcaaacccttacctgaactccggtttcacaccaatatctttctgctgaagatcttgaaggcttcttgtgattttgttaaaggccgcatcctaacaacagattttaacgaaccttcaaatttctcaaaaagcacagaagaaggcttccatcttgggtgataataactgagaacctacctcacttgcctccatggtccccacgtatttaaagatcaggttgtaaatttcatgatggacgtatatctgtggaatcaacagaccccattcagggtgtgagcgggcaacagggtgtgcctcccagccactccgccccaccctcacctccactgcctgcttcatcaggttcatctgggcctcctgcttggcgagcattttctagagggcaagaaaagcacagtgaaagggcttggatttgcatgggggtgcaccacaattctccctctcagaagtcctgctgcttaccaggtgagagtccctcagaagctgctggaggcatttggtgtagagagcattcgctgagtcctaaaccacatagagcagagggacaggccacccttaccagcaaggccatgacgggggagccggagcgggtaaggcgcacagagcttcaagtgctaacacaagctttatgaagtcaattacgtgatttttctcaactttttttttaggtgtatatgcattaaaagcaggagaaacttccccttggggttaacacagaggataataatactcattgttatacttccccatgactttaccacttggtttgttttttctttttaagagacagggtctcactttgttgcccagagtagagtgcagtggtatgactatagcacgctgcagtctcaaactcctgggctaaagccatcctcccacctcggcctcccaagtagctgggaatacacgtgcatgccaccatgcctggctaatttttgtattttctgtaatgatggggtctttttatgttacccaggctggtcttgaactcccagcctcaagagatcctcccatctcggcctcccaaagtgctgggaagacaggcttgtaccaccatgcccggttaaactacttttatagttagagagaaacatttttaaaagacttcaaacagtgaggcagcaccaggcagttccagaggaaactgagggctcccagcaccctgcactgaaccgagacagggcacgccaggcagaggacagcacggctactgactatgtggtgacggaggctctttctctcgcattctcggaatgttcgatggaaagaggcgatgttcctgtcaaatcgctcggagtgtcttcccaagaactctctcacatcttcaatggttttcagggaaaagggatctgagggtgccaaaggctcttctgaaaaagaaacaaacaggtcaggccggctgaagcctctgctggttcctgactctgtcctatcctacagggcctaggccctctggggaggagggcaaatgtccttatttcaagacactacacaagaacagcccagttacaggacaccctggagtccagagagcctggtcctctcaaggcctcttcctgggacaaaaccaaactatctgggaccatgggcaagaccccaattcctgacaataagagcatcagtgtgcatccagcacattattatctcaattttctggggcaaatgaagacttattatttattaaaaataacgaaatctcaaagaggcacaatgctggggctgggcgctataagagacagccctgaagctgacacccagagacaaagctggggctactgctttgcataactcatgggggcaacagtcacatcccaggctgatcacaggtaggctgtctatgcgaatgctgcctcctggaattgtgcaatgcccgacctgtgcaacagcagccccgatccacacctccttagcccagtgactttaaagttctagtaggaaccactgaaaacaattatataggtctccatgtggctcttgaatattttccatgatgtttaaccttttttaaaaaaataatttattggccgggcgcagcggctcatgcctgtaatcccagcactttgggaggctgaggcgggcagatcatgaggtcaagggatcaagaccatcctggccaacatggtgaaaccctgtctctactaaaaataaaaaaattagctgggtgtggtggcgggcgcctgtaatccccgctactcaggaggctgagacaggagaatcgcttgaacccgggagctggaggctgcagtgagccaagattgcgccactgcactccagcctggcaacagagcaagactccatctcaaaaataattaaataataataataataatttattttattgtttttggagatagggtcttgttctgtagcccatgctagagtgcagtggtgtgatcatggctcagtgcagccttgaattcctaggctcaagtgaccctcccacctcagcctcttgagtaactgagactacaggcatgcaccaccatgcccggctaattattttatttttttactttttatttttatttttatcttttttttgaggcgtagtcttactctgtagcccaggctggagtgcagtggtgcgatctcggctcaccacagtctctgcctcccgggttcaagtgattctcctgcctcagcctcctgagtagctgggattacaggcacgcaccactgcacgtggctaattttttttgtatttttagtagagatggggtttccccatgttggtcacgctggtcttgaactcctgacctcaggtaatccgcccacctcggcctcccaaagtgctaggattacaagcgtgagccaccacgcccagcctactttttatttttgagacagagtctcactctgtcacccaggatcgagtacagaggcgtgatctcagcttactgcaacctccactttctgggttcaagcaattctcctacctcagcctcccgagtagctgggattacaggtgcatgccaccacacctagctaatttttgtatttttagtagagatggggtttcaccacattggccaggctgatcttgaactcctgacctcaagtaatctgcctgcctcagcctcccaaagtgctgggattacaggcgtgagccactgcgcccggcttgatttttttaatttttttatagagacagggtctcactatgtttccaggctagttttgaactcctggcctcaagtgatccttgtgcctcggcctcccaaagtgcagggattacaggcgcgagccaccatacccggccttgtttaacctttcaacagctaagtcaggaacaagttcaacaaacacatttttctaaaacaggagaaaaaggttttttctcccagaatacctgaactctctctcttttccaaaggatgggctatacacaggatgctgaaactctcttctttttcattgtagaaagtttcttcaaagagaatgggcactgagagaagacaggcaaaaccagctcctaatttaatcctgttcccttgaataaagacatcctggaaacaagaaagccatcactgcaccagcagccggggcaaccacatcccactctcagcctggcccccgatgcagcacttaaccagaccctacggccttcaccccattgtgggtttgctggggcacaaatactctcctgttttgctcattttgatactaaaatgtttcctctttgttggcctagtagctatggctgcaagatacctgaatcatttctattttcttttgagacagagtcttactccatcacccaggctggagtgcagtggtgcgacctcggctcactgcaacctccgcctcccagggtcaagcaattctcctgactcagcctcctgagtacgtggcactacaggcacccaccaccacacccagctaatttttgtatttttagtagagacacagttttgtcatgttggccaggctgctcttgaactcccagcctcaggtgatccgcccgccttggcctcctggagtgctgggattacaggcgtgagccaccacacctggcccacacgatgcatttgttcatcttttcagtttcctttatttggaacagtgcctcggtctttctttgcctttcacgacattgacatttttgttgcgtatcgcagactctccctccgtgtgtttgggagggtttgtctgatgtttcctgacaattagattacggttttacagttacacgtttctgataggaatgccctgaaagggatgttttatctccctctgtgtatcctgttggaaggcacatgatgtcagcttttttcactgttgatgttaaccatggggtatgtgtcgttttgttttgttttgcttttaaagcggaagcaggtaggttctgagagggggagattttattcccattcaggaatggccctgtttttcccggcatccccatagtcagggaagcccggccacagtgtcctcactggggcaggggctgtgttcagatgcggcagctgaggtttgtggcgctgtgacagggagaggaagcacggggttgtcagtgcatctgctctgccctgtggctcacaagacacactgctgttttcctgctagagatctgctcaccccagctgtcagtcagcttagttgatttgttctcttttggacacctagatctacaaaaaggacaggagtcgggctttgcgcagctggtctgcccccagcacccggccatgaccacagtaagccatgcagggagtagcaggtgggattcagccctggccacactgcagcacaagattacttccatctcttagatagggagagctttcttaccttttcttttcacaaagaacacagaatttcttctcctaaagaaacagctcaatgttttttctgttgcaacatttaaaaaggatccaggccgggtgcagtggctcatgcctgtaatccaagcactttcggagaccaaggtgggtggatcatttgaggtcaggagtttgagaccagcctggctaatatggtgaaaccccgtctctattaaaaatacaaaaattatccgggcatggtggcgagtgcttgcagtcccagacactcaggaggctgaggcaggagaatcacttgaacctgggaggcgcaggttgcagtgagctgagatcaagctactgcactccagcctgggtgacagagtgagactccgcctcaaaagaaaaaaaaaatgtagtgtgtgattctagagctaagaagaagttttttttgctatgaaagatataattggtataatcagcacagtctgtatgaggacaatatgttggaggacattctatcaatgctaaattatctgagtgtgatcattgcgttgtggttacataagagaatgcctgttcttgggaaatacacactgagctgtcttgggctaaagggcacagtgcctgcaacttactctcaaaagattcaggccaggcgcggtggcgcacgcctgtaatcccagcactttgggaggccgaggcgggtggatcatgaggtgaggagatcgagaccatactggctaacatggtgaaacctcgtctctactaaaaatacaaaaaattagctgggcatggtggcgggtgcccgtagtcccagctactcgggaggctgaggcaggagaatggcgtgaacctgggaggcggagctcgcagtgagctgtgatagcgccactgcactccagcctggtgacagagcaagattccatctcaaaaaaaaaaaaaaagattcaaaataataataatatgtgttgagagacagcgataaaaccaatgtggcaagaatgttaacagcttggggggaagcacatttaagagttttttcaactttactaaaacatttgaaattatttcaaaacaaaaagattgttttttgggtttgttttttttttttttttgagacagggtctcactctgttgcccaggctacagtgtggtgacacaatcatggcttactgcaagctcaaactcctcagcttaagcaattctcccacctgtgccttccaagtagctaggactagaagcacgcaccatcacgcctggctaatttttttatttttatttttggcagagatggggtctcgttatgttttccaggctggtctcaaactcctggcctcaagtgattctcctgcctcggccccccaaagtgctagaattataggcgtaggccaccatgtccagctgaaacaaaaagcttttaaaaactaaaatattcatccctgatgtcctattcgggaccaagacactgacaagcttttcacggcactgggataaaacaacttcctttggctcggacatcagcaaggaggaggtgttccagcgacacacggcagaaaccccatcacgggatcagagagagatgcttggcacctcccggcctccaagacagcagctggggtccagcttaccatcactacctccctttcctccaccacaaaggcagggtccctccagccccccacggggctgcagtgtgtgtcaaatgccaccattgccagtagctgtgaaaggctgagaacgggactctcttcctcccctctggccccaaacaccgagtaggtgaccctggctgatccaccaagaaatgaatacctttccatttaaggtctgaaaatgctcttccacaggtatcaaaatgtaggactcaaactgacaagtagactggatgctgctcgacaggcttcctttgcagggtactaagacctggaaaaaacaattcggggcaacattagacagacgtgccatttaccacctcagcagaacaaggtgtccccaaaggcgctccagctggacacacagcgggacctgctggcagagagaacgcccgaggtcccttgccaacacggccacagtggctgccagctgaggtgatctgctgctgctgttgttgttgttgttgctgttgtgatggaatcagcctcaccccaccacaggcagagggaggaggcgaacagtacaaatccttctccaccttcagatgtggaggctgacggctccttcctacaatcgctgggtcccccccaggctagtggccccaggctccctctctattcttaacagcacagttataaggacccaggggctcagggacaagcccagatgaagagaggagcatttggaaagtacagaaaagggaagctaaaaaatcacactttctcccaccattcaaaaaagaaacatggccaggcgtggtggctcatgcctataatcgtagcactttgagaggccaaggcaggcggatcacttgaggtcaggagtttgagaccagcctggccaacatggcaaaaccctggctctactaaaaatacaaaaattagccgggggtggtggcgcacgcctgtaatgccagcactttgggaggctgaggcaggcagatcacttgaggtcagcagtttgagaccagcctggtcaacatggtgaaactctgtctctactaaaaacacaaaaattagccaggtatggtggcatgtgcctgtaatcccagctactcgggaggttgtgcttcagcccaggaggcagaggttgcagtgagttgagatcacatgattgcactactccagcctgggctgcagagcaagactctgtctttaaaaaaaaaaaaaaaaaaaagaacacttcacatggatgatggtttccttctattcttttctttacgcttttatttattttttttttttggagacagtgtcttgctctctcaccgaggctggagtgcagtggcgcaatcatagctcactgcaccctcaacctctgggctcaagccatcctcctgcctcagcctcgtaagtaactgggacaacaggtgcacacaaccatgaccagcattttttttttaagtagagatgagatctcactattttgtccaagctggtcttgaatccctggcctcaagcgatccttccaccttggcctcccaaagtgctgggatgacagtcatgagccactgtgcctggtccattgtattattctttgtttgaaattaaacataataatctgaaattttaataaaaaattaaaataaagggaggcccttagatgttaggctagaagaaatgacctcaaggctcccaagtggcctcaccactgcagttggcagacaaagaaagaagatcctagaggccaaagtgggccacaggcaatgggatctaaagagccagtcctcgggtatttaatgcttgaagtcagagatggccccccctccagctgcagcatgaaggactcacaccatcccattcaaggaagggccgtggctggagggccttcatgtggcctctgggaagcaggaacttctttttttttgagacagatctcgctctgttgcccaggctggagtgcagtggcgtgatctcggctcactgcaagttccgcctcccggattcacacgattctcctgcctcagtctcccaagtagctgggactacaggcgtccgccaccacacccggctaatttttttgtatttttagtagagacggggtttcaccgtgttcaccaggatggtctcgatctcctgaccttgtgatctgcccacctcagcctctcaaagtgctgcgattacaggtgtgagccaccacgcctggcctcgaagcaggaacttctaaggggcctcagagaactctgccccactgtgcccacatgctgcccgcttgtttgcatcaccttctccgcctccctgacttgcataatgcacgtctggccccattcactgcatccccactgtcaagcacactgctggacacgaggcaggtgcccagtgcatgtttactgggtaaatcgggggccctcaggaccaacccttcccccaactagttttctggcagacataaaaaggagctctagttcctcctatgccaagaaagagagaggcccctgctgcccagagcatttcatagcaaccagaagccaacgctgggctccctggctccacccaccatccccacagcaatcctgctgagaccggggaggagttgcctgggatagggggtagagagctaggccaacggcctccaggctatcccttagggggcttcagactacttctggagtagctgtggagtttttactgctggcaaagactttccagagttaccggcatagacgaagttcagagttactgcgttgaccagaaggtggggacccagaaatttcaaggcttaaccaaaaaatggtttattctagcccctttagaaagaattttttaaatcacagtaattaaagaaaggccatgtgtggtggctcacgcctgtaattccaacactttgggaggctgaggcaggtggatcacctgaggtcaggagtttgagaccagcctggccaatacggtgaaaccacgtctctactactaaaaatacaaaaattagccaggcgcggtggcaaccgcttgtaatcccagttattcaggtggctgaggccgggaggcagaggttgcagtgagccgagatcgcaccactgcattccagcctgggctacaagagcgaaactccatcccgggggtagggtgtggggttgggggaaagaaagtcctgcaggagctgcattttatgaggaaaaacaaaaggagacaggtgaggtggctcacgcctgtaatcacagcactttgggaggctgaggcgggtggatcacttgagtccaggagttcgagaccagcctgggcgacagggcaaaaccctgtctctacaaaaaatacaaaaattagccaggcgtggtggtgcacgcctgtagtcccagctacctaggagactaagacaggaggatcacttgagtccaggaggtggaggttgcagtgagccaagatcacgccactatactccagtgggagtgacagatcaagaccccatttcaaaagaaagaaagaagaaaagaaaagtcaaataaaaggcaagaatctgcctgagtggcacctactccagggcactctcctgcttcttccccaggctggattaagcactccacaactgcccacgctgccttctgtcctgatattcctctggcctgcaaatggcctgttctggaattccctgaaggcgtgccaagttccccattgatcgtgtaaccctgaaacctggcacggtgcctggcgtggagtggatggccacggcttgttggaagcatctatactaaataaattctgagaactggagcaggggtctcagcgcccttagctcggatgaaagttagttcctggggcttagaagacatgctgctaggctcccagactaggcccccggagcctacttaccccattaaatcagacaactcaataaaagaaccaagttcaatctcctttgaaatttttgtttttcctgtaggcaaaggggccagtctcctggtgcacctgggaaacctggaggactttcaactctgcactaaagccccagggacgcagacctgcccagcctgctctgaggacgccacaggtgtgtaattagccggatagttgtaagcacagaggtgacttttagaagcagtggggttgtcacaggcctctgaaattgaaatttgaaatctgggtgagcacaggagaaggcgcttccactgtccaatcagatagcagaggagggcaggaaggagacacctgcctggatgtgggggcatccccacaaaaggagcacctgcgaaggaaggcgcttcgaggcgtggcgtggcgggggcggggacggggtgggggtggggagggaaggagcagtcaagctgcaccctcagctgccccacacacactgctgcagggccacatggagatgaggcggcccagcagcgtgcacgcagggagaagcgtggtgcggttcactctgcgggagacacatggttttttttgtttgtttttgtttttttgagacagagtctcgttctgctgcccaggctggagtgcagtggcgtgatctcagctcactgcaacctccgcctcccgggttcacgcgattctcctgcctcagcctccccagtagctgggattataggcatctgccaccacgcacggctaattttttgtatttttagtagagatagggtttcactatgttggccagactggtctcaaactcctgacctagtgatccgcctgcctcggcctcccaaagtgctgggattacaggcgtgagccaccatgcctggccaagacatgtttttaagtgatttcacattttttggagcctgataaaggactctgatctccagggcagactcaagggcagtcaaacttggtacaaggttatgaccagcctgggcaacatagtgagaccccatctctaccaaaatattaaaaatgaaataaagttggtacaatgtccaaacttcatggaaagatatttggcattcaactgctgaggccacagggatcccttagaggtgacagaaaggatggcattttcctggagaccatcgagatattcgactttttctttcaatctatgaacataggtagagcacaactgcggactggacaggtgtgggtccatgtccctcctcacacggacaagagggggccggcatgggccagcaaacctgaccagtgtgacagtgacagcagctcctgcactctgctgatttctgctgagatgctggcctccctgattctttttttctttttttttagagatggtgtctcactatgttgcccaggctggagtgcagtggctatttagaggtgcaatcccactgctgatcagcacgggagggttttttgtttgttttgtttgtttgtttgtttgttttttgagatagagtcttgctctgtcacctgggctggagtgcagtggcgcaatctcagctcattgcaacctctgcctccaaggtacaatagattctcatgcctcagccatccaagcagctgggattacaggtacgcaccaccacacctggctaatttgtgtatttttagtagatatggggtttcaccatgttggccagtctggtcttgaactcctgacctcaaatgatccgcctgccttggcctcccaaagtgctgggattacaggcatgagccactgtgcctggcaaagcacaggagttttgacctgctctatttccagcatggcagtgttcacccctccttgggcaacatggtggtcccccattcctgggaggtcaccatattgatgccaaacttagtgtggagatgcaatcagcatagctcacgacatcccagagctcctgggctccagcgatcctcctgcctcagcctcctgagtagctgggactacaggcctgcaccaacatgcctggcaacctcactgattcaagtccaccaaacaaggctgaggaagacaagaggctcactgctgccccatgtggaccccagcagttccttgtggatgccttggatctcaggaggagctggactgagggtctggggttctgtggggcaaccctggatggcacagcctaagaagaatctccattctccggtgtccctgaaaggaaggtgacaaggcagaaaagttcattcaaaatcccccttttgctaaagtgggcttgagtgggatcccatgacttgtagctgaaaagcacttagttggccaggcatggtggctcatacctgtaatcccagcactttgggaggccaaggcaggaggatcgcctgaggtcaggagttcaaggccagcctgggcaagaaattgagaacgccgtctctacaaaaattacaaaagttaggccggacacagtggctcacgcctgtaattccagcactttgggaggccaaggcagatggatcacttgaggtcaggagttcgagaccagcctgctcaacatagtgaaaccccatctctactaaaaatacaaacatcagtcaggcatggtggtgggtgtctgtaatcccagctacttggtaggccgaagcaggagaatcgcttgaacccaggaggcagaggttgcagcaagcccagatagagccactatactccagcctgggcaacacagtgagactctgtttcaaaaaaaaaagaagaaaagaaagaaaagaaagaaaagaaagaaaagaaagaaagaaagaaagaaagaaagaaagaaagaaagaaagaaagaaaagaaaagaaaagaaaagaaaagaaaagaaaaagaaaagcctgaagtggcagctgccaggctcactaacaccatgctgagcaagatagagcttccccaaagagcttccacagaaataactatgccacagtgtgacagttctaaaaagctggataaagatatatatgaaaatatgcacttgtctagacagtagtttaaaatatcatacaacgaagacaggaagagaggaaatattcccgcagtacggccaggccctccctgatccatgcccaccttgcgtcccgtacttttcctctgcgacactcaccaccaccgtaattagtatgcactcgctcagtgaatgaccatctttcgcactagaatttaagctccatgagggtaaagatggtgatctagggccaggcgtgacagctcatgcctgtaatcccagcactttgggaggctgaagcaggaggatcacttgaggccaggagttcaagaacaacctgggcaacatagtgagaccccatctctacaaaaaataaaaaccagccaggtgtggtggcacatgcttgtagtcccagctacttgggaggctgaggcagaaggactgcttgagtctagaggtttgaggctgcagtgagccgtgttcatgtcactgtattctagcccaggctgggggacaaagcaagaccttatctcaaaaaaaaaaaaaaagagtgatgtgtgtttctgtttcttggtgaatcctcaccatcaagcaaagtatcttgtatacagcagcttttaataattgctgtgaaatgaagagatgacagtgaatgtctttggtgaattttatgagatttttatttggaaagagctatatattctaatttttaaaataatgaactttttggcttctaaaatctaaagtaagaagattgtggtgaagaaatatgaatcacaaaactaatcataaaaactggaaaagatgtcaagaaacccagcttctctttgggagatggaggtgggcggataacttgaggccaggagttcaagaccagctgggacaacacggtgaaaccctgtccctactaaaaatacaaaaattaggccaggtgtggtggctcacacctgtaattccagcacgctggggggccgaggcgggtggatcacgaggtcaggagatcgagaccatcctggccaacatggtgaaaccctgtctccactaaaaatacaaaaattagttgggtgtggtggcacacacctgtagtcccagctactcaggagactcaggcaggaaaatcgcttgaaccccggaggtggaggttgcagtgagtcgagattgcgccactgcactctagcctgggtgacagagcaaggctctgtctcaaaaaaaaaaaaaaaattagccaggcatggtggtttgtgcctgtaatcccggctactcaggaggccgaggcaaatcacttgaacccgggaggcagaggttgcagagagtcgagattgcgccactgcactccagcctgagcaacagagtgagactctgtctcaaaaaaaaaaaaaagaaacccagtttctgatggcagagcttggcctgggcaaaatcaaagtcaagtccaggccagacacagtggctcacgcctgtaatcccagcactttgggaggccgaggtgggcagatcacctgaggccgggagttcgggaccagcctggccaacatgggtgaaactccatctctagtaaaaacacaaaaattagctggacgtggttgcacacacctgcaatcccagatacttgggaggccgaggcaggagaatcgcttgaacctgggagacagaggttgctgtgagctgagatcacgccaccacactccagcctgggtgacagagcaagactctgtctcaaaaaaatttaataaataaaaataaaaataaatgaaagtcaattccggcgtccgagaggccgctgagaacctgaagccacactcagctaacctgacttctccttcagttcaaaccctcaggcacctcacatatctaagtaaagtcgccccacgggataagagaagtggacatccatttgagagagtaggggacaacagacaaaaagaagacggaagactcctgaagcagaggccacagatgacacaaatgcacccgggacactgtgtcccccagtgccgtctaagtaggatgcccgccaagttcactgacctgagaactggaaagacccacaatgtggggcccgcccccgtccaggcagatgcccccaccatgacaggcgacagcgtctcctgcctgcttctcattcctgttacctggctgcccctgaaggcttctgaggttgtggcctctaccagaaaagttctttcatcatggtgctttccctttggaaaaacctttcaaagcagtgtatgaatgtgtttactcggtcccttattctatgagggtgagcacccacctcccagacagaccaggactcgtaaggccccagggagcacaactcattttagccctggagaagcctccataggcaagagagaaacgagagcaccgcagcgtgagaccaagtgtcactgggggtgctccacgaaagggcacagttagccacaggcgggggccaggagttcagagaaagtattacagcctggactgcagtcccagaaggcttcctggagggagcggctcatgggggcccctcgctgctcactcacagaccaagcacactgctgggagcttgttaagctgagtttataacaaactccctccaaactgagccttagtctaccacgtctctggaaccattcatgcctcaggacaaccccgaggctcagtgcacttacaatgccatggatttgggccactttgctgcacaagtcagggcggcacttttgcagagccagatagaaaggatttttcaggaggtcttcatcatacagagccatatggacttcagatgggtcagagcaaatctcctgcaataagggagggaaaagcagtgaatagccattttcgagtttacgtaacacatgaaagtctgcatctgatgcatctggcattttctttttctttttttttttttttttgagacagagtctcactctgtcgcccaggctggagcgcggctcagcctcgggagtagctgggactacaggcgcccaccaccacacccgcgaatttttgtatttttagtaaagacagggttttgccatgttggccaggctggtcttgaactcctgaccagcaggtgatctgcccgcctcagcctcccaaagtgctgggattacaggcatgagctgtcacacccgacctgcatctggcaatttctaaagagtatcctccaaataaaaaaggattcatgacgtgccatttttttctcccacagactcactccaccaggaaatctcaaatacaacccactaattccaagatgacccgtttattggctaacgtgtaaattatgctcagaaaatcttgttaaactccaagtcttggctaaagtataaatggctatttttagaatatcctacatgaccaaaattatgacattctcaagatactcatttatttttaatgaaatattttagcacatggaaaagtactgagtaataatgcaaacctagcaccagaattaaggaatcgtcacattttgccatgtttgcctcagattttcttttaagaaataaagtggaagccaggtgtggtggttcatgcctgtcatcccagcactttgggagcctgaggtaggaggatcctgtgagcccaggagttcaagaccagactgggcaatacagcaaaaccctcacttctacaaaaataaacaatttatctacaaaaaaaaccaattatctacaaaaataaacaataaaaataaacaattatctacctctacaaaaattaacaattatctgggtatggtggcatgtgcccgtagtcccagccactcgggaggctaaggcaggaggatccgcttaagaccaggagttggagaccagcctggacaatatagcaaaacactatctcctcaaaaattaaaataataaaatttctgttagtctgtgctatggtctaaatgtttatgtcccccaaaaactcatatgttaaaatactaacccgctaggcggggcctttgggggtgattaggttacaaaggcagagccttcatgaatgagatcagtgcccgtaattatgcagccgggcacagtggctcatgcctgtaatcctccctttgggaggccaagtcgggaggatcacctgaggtcaggagttcaagaccagcctggtcaacatggtgaaaccccgtctctactgaaaatacaaaaattagctgggtgtggtggtgcatgcctatagtcccagcttgggactgcccaggaggcagaggttgcagtgagcagagatcacgccaccgcactccagcctgggtgataaagcgagactccgtttcaaaaaaaagaaaaagaaagaggcctgggagagctcctttgctcctccggccacgtgaggttacagagaacagacagctgtttatgaagcaggccctccccagacatccaacctgcaggatcttcaccttgtacttcccagcctccagaactgtgagaaacacatttctgtcattttcaagccttctattacagcagcctgcatgggctgagatagtctatgagtataaagccatatcccactgtttttcattttcattggttcattaattaaatgaactaaatttctttcggttatgtaaactgcctgatcatgtcttttgctcactttcccgctgggttgttggcctttttcttaggatttatagttctttacacatctgtatactaaagtaagttttaaatatcatctcccaggctggctgtaatcacagcacctggggaggatgaggtaggaggatcacttgaggtcaagaggtcaagaccagcccaggcaacatagcgagaccccatctctacaaaaaaagttttaaaaattagccatgtgtggcagcccatgcctatagtcccaggtactaaggaggctggggcaggagaatcacttgagcccaggaggttaaggccgctatgagccatgatcacgccactgcactccaccctgtgtgatggtgcaagatgctgtctaaaaaaaaaaaaaaaaattatacacacacacacacacacacacacacacacatatactcacaccatctcctagtctgtaacttgctttttcattttgtcaaatgggtgtgttcagaaatagaactttggatgttatttattttgagacagggtttcacactgtcgcccaggctagagctggagtccaatgacatgatcgtagctcaccgtaaccttgaactcctgggctcaagtgatctcccacctcccacctcagcctccagagcagctgggactgcaggcatgcaccaccacgcccaaccttttttttattttttactttttgtagagatgagattttgctgtgttgcccacgctgaacttgaactcctggcctgatgcaatcctcccacctcagcctcccaaaacgctgggattacaggcatgagtcactgtgcctggccagaagttttgatgtgaatggaccgtcatccctcagtatacttgggggattggttctgggatcctcttgtatacccaagtccatacatactcaaatcccatggtcggccctgtggaactcacatgtctgtgtcagccctccatatacagaaatttgcaacctgtgaatatggtattttcaacctgaatttggttgaaaaaaacacatataagtggacccacacagttcaaacccatattgttcaagggtcaacaataattggatttgccactctttgcttttaaggtcagtgctttttgagccttaagaaatctgtaattggcatgcctatcctctggcaggtctttttgcaaagtgacttcactattcccccatcagaagatagagtaggccaggcacggtggctcacgcctataatcccagcactttggaaggccgaggcaggcagaacacttgaggtcaggagttcgagatcagcctgaccaatatggcaaaaccccatctctacaaaaatacaaaaattagtggggtgtggtggcatgtgcctgttatcccagctgcctgggaggctgaggcaaagaatcgcttgaactcaggaggcagagattgcagtgaccccagatcctgccactgcactccagcttgggcaaaagagaaagactcagtctccaaaaaaaaaaaaaaaaaaaaaaaaaggaagtagactcatttccgcagcccctgaatcagagccagccctgtgacttgcttcaaccaacaggcagaatcgatgctgtacaatttgtgagtgtcagcttcaagaggtcttacaggggctgggcacaatggctcactcctgtaatcccagcaccttgggaggccaaggcaggaggatcacttcaggccaggagttcaagactagcctgggcaaaatagcaagaccttgtctctacaaataataaaatacaaaaattatccaggtgtgctggcacatgcctgcagtcccaactactcgggaggctgacatgggaggatcgcttgagcccaggagtttgaggctgcaatgaactatgattgaaacactgcactccagcctaggcaacagagtgagaccccatctctttaaaaaacaaaaaaaaaggccaggcacggtggctcacgcctctaatctcaacactttgggaggcctaggcgggtgggtcacttgaggtcaggagtttgagaccagcctggacaacatggtgaaaccccgtctctactaaaatacaaaaattagccaggcgtgatggcatgtgcctgtaatcccagctacttgggaggctgaggcaggagaatcacttgaacccaggaggcagaggttgcagtgagccgagatcacgccacttcactccagcctgggtgacagagtgagattctgtctcaaagacaaaacaaaacaaaaagtcttagtacattcaagaaataagaaaagtaaatgtatatacatacatacacacttataaaagggcttgcggattccattctcattctcttggtaccccaagatcccaatgctatgaagaagcccacatgatgaaaggccatggggggagagcgaggcctaggtggcccagcaagcacagccaacccaccagcagaatacagccccttgagggatcccagctgagaccagtagaggaaccacccacccaactcacacaacgtaggaagtaataaattgtggcagtttgaagtcactacattttgggtgggtttgttacacagcaaaggctacctgaaaccacgtcctttccaatttcaaagccataaagatagtccttatgatttctaaaaagagtaaagttttctatttttaggtcttcaatccatctggatttttgtacatgctataaatcaagtgtctaattatatttctccatatagtaagccaatcgtcccatcatcattttttgaatattctatccatttcacacaggttgataatgctacggctgtcacactccaagatcccacgtatgtttagcctgtttccaggctctactctgtttcaagggtcttactgtcacatgtgagaaatacaattatgtatatattacatagaaatacacaatgtcattttaaattttctagtagcacattaaaaaagaaatagggggccgggtgtggtggctcacgcctgtaatcccagcactttgggaggccgaggcgggcggatcacgaggtcaggagatcgagaccatcccggctaaaacggtgaaaccccgtctctactaaaaatacaaaaaattagccgggcgtagtggcgggcgcctgtagtcccagctacttgggaggctgaggcaggagaatggcgtgaacccaggaggtggagcttgcagtgagccgagatcccgccactgcactccagcctgggcgacagagcgagactctgtctcaaaaaaaaaaaaaaaaaaagaaagaaatagggtgcaattaattttaatgatatattttatcttaatatatccaaaatatgatattttcaacatgtgaccattatttattttgttttttagagacggggtcttgctatgttgcagtggctattcacaggcacaatctcagctcaccacagccctgaactcccagcctcaagcagtcctcccatttcagcctcccaagtagctgggaccacaggtatatgtcactgcacttgacttgatcattatttaaaagttattggctgggcacagtggctcacacctgtaatcccagcactctgggaggctgaggtgggtggatcacctgaggtcaggagttcaagaccctggccaacatcatgaaaccccgtctctataaaaatacaaaaattagccaggtatgatggcaggtgactgtaattccagctacttgggaggctgaggcagaactgcttgaacccaggaggcagtggttgcagtgagccgagattgtgccactgcactccagcctgggcaacagagcaagactccatccccaaataataataataataataataataataataataataataataaaaagttcttcatgatggccgggcacagtggctcatgcctgtaatcccaccactttggaaggtcaaagcaggtggactgcttgagtccacgagttcgagaaaagcctgggcaaccccatctttacaaaatacaaaaattagccaggctactcgggaggatgaggcaggagaatcgcttgagcccaggaggcagagactccagtgagctgagattgcaccactgcacagcagcctgggtgacagagtgagactctgtctcaaaaaaaaaaaaaaaaaaaactgttattaatgatatattttacatttttttattcttaagtctttaaaatctagtgttcattttacatttacagcacttctcgattcatactagccacatttcatgtgctcaatagccactagcagctattacactggacagggcagggagagaccacatatgaacatttattttacatgactacagcttcataataagccttactaactcacagagaaaagctcccctccagcttgttctccaaaggttattccttgtcctttacaatatcaaatgaatcagaatcaccttgtcaattacatgaaaaatcctattaggatttttattggacccgcactaaattcatgaattttttttttttttttttgagacagagtctcgctctctcacccacactaaagtgcagtggcacaatctcagctcactgcaacctttgcctcccgggttcaagcaattctcctgcctcagcctcccaagtagctgggattacaggcacccgccaccacaccaggctaatttttgtttgtttgtttgtttgagacagagtcttgctctgtcacccaggctggagtacagtggcatgatcttgactcacagcaagctctgcctccagggttcacgccattctcctgcctcagcctctcaagtagctgggactacaggcgcccaccaccatgcccagctaattttttgtatttttagtagagatggggtttcgctgtgttagccaggatggtctcgatctcctgacctcgtgatccgcccgccttggcctcacaaagtgctgggattacaggcatgagccaccgcgcccagcctgccgttttttttgtttttcgagacagaggtcttgctctgctgcccaggctggagtacagtggcgcaatattggctcactgcaacctctgcttcctgggttcaagcaattctcgtacctcggcctcccaagtagctcagactacagactacacgccacaacaccagctaactttttgtgtgtattttttggtagagacggggtttcgccatgttggccaggctggtcttgaactcctggcttcaagtgatcttcctacctcggcctcccaaactgttgggattacaggcgtgagccaccacactcagccctataattatgaattttatcatccacatacatggtatatctttccatgaatgtcttcttcgatgtcctccgacttttccataaggatcgtatacgacttttattagactatttatatattctgtatagactttgctgctgttgtgaaaggggttgctaaaattagattgcttattttaggtaaggttctaaaagcaaaagccaaatggacttacatcagagtcacgctgtacagataaaataagaatcagtatggaacacacctaccactaccatcagaactgggacttctgaagccagagaagacccttccatgattcatgactgaaaggtctgtgaacggccaaaagaagattacaggtcagtgttcaactcactttaggaagtaagctgtttgaaggatgttgctgtctgcagactgctccatgctgctaactaatgtgaaccagtgctttgtgtgtttcatgaaacattctatagctgctcctcatcacccctggtctgctcctctgagccaatgagctctcagagggggtgcctacaaaatgggcacagaaaaggaaatcagatttctatttttttttttttttttttttgagacagagtctcactctgttgcccaggctggagtgcagtggtgcaatctcggctcactgcaacctccacccctgtgatcaagtaattctcctgctgcctcagcctccctcgtagctgggattacaggtgtgcactaccactcccggctaatttttttatttttagtagagacggggtttcatcatgatggccacgctggtctcaaactcctgacctcaagtgatccgcccacctcggcctcccaaagtgctgggattacaggcgtgagccaccatgcccagccaggagatcagatttctaaccacgtcatcccacctctctgagcctccatctgggcctgcaccacagagaatgctaatacctgtctgcaggactcttatgagggtcatttccatgccaccttcactatctgtgacatgcagtactgcatatcaacatagcaccagttactgcaagctcacatgggacctttgtgagaattagaaacaggcacccgacttcccagggggcgcagctctgtgcaagggcactaggctagtgagcagctcctaggtaacatgctgcacggcccctgctgctgggcagtgaacaacctgcccacaatgtgagcacaattttgcccaacaattacacataatggctctcttgctagtgtttgacattttccttcaataacttattgtctttataaaaatgtattttcctttctgttttatttttgtttacttttgtagaaatggagtctcgctgtgttgcccagggtggtcttgaactcctggctcaacaggcatatgccaccatccttggcctaaaatttattttaaaaagaaatcttattactactttaaatagaaaaatggtatcacttccaacgaagagaagatcatcttaaagttaaaaattataaaggtaattactgttatttaaaacctcataatcccagcactttcggaggccgaggtgggcggatccagcctggccaacgtggtgaaaccccatctctattaaaaatacaaaaattagccgggcgtggtggcacacacttgtaatctcagctactcaggaggctgaagcaggagaatcgcttgaatccaggagatggaggttgcagtaagccgagatcatgccattgcactccagcctgggcgacaagagtgaaactccgtctcaaaaaaaaaaaaaaaagtcattagatgctaagcttgagcctggggccttctctcttcattaaaatgagaaaatcagcaactatttaaaaagcgtaaaagtgaatttatccttgatacaattaaatgaatgaaatatgaaataggagctactctctcactatgtaacagggatccagaatgcttccttgggaaaacactatgcatacataactgcatgatgaattctattccttggaactaatggtaaaaatagccaccatttgggagagtccttgtaccaggcactgcaataacttctatacatcctcatctttacttacttaccttcatttatttatgagttggggtctcactctactgaccaggctggagtacagtgacacaatcatagctcactgcaccctcaaactcctggcctcaagcaatcctcccaccttagcctcctaaagtgccacaattacgggtatgagccacctggccaagcctaaattttttgttttgttttgtttttggtagaaacagtgtctcactatgttgcccaggctggtctcaaactcctgacctcaagtgagcctcctgccctggcctcccaatgtgctggggttacaaggcataagccactgtgcccagtcttatcttcatcttttttttttttttttgagacgggtcttgctctatcactcacactggagtacactggtacaatcacagctcactacagccttgacctcctgggctgaggtgatcctcctgcctcagcctcccaagtagttgggactacaggcatgagccaccatgcctagctaattttttttttattctttgtagagatggggtctcactaagttacttaagcaatcctcctgtctcggactccagggtgctgagattacaggcgtgagccaccgtgcccagctaattttttaattttcagtacagatggggtctcgctacattgcccaagtgatcctcctgcctcagctccccctaagtgctgggattataagtgtgagccactgcacccagcactcatcctatcttaatgctcacaataactctaggcaagtaggtatcactagcctgtgtcacagatgaagaaactgagatgcagctggctgactcaaggataaataagagccattcattcattcattcatttagtagagatggtgtctcgctatgtggcccaggctggtctcatactcctggcctcaagtaatcctcccgcctcagcctctcacagcgctgggattacagcgtgagcaaccatgcccagcctaagagtcatattttatttcaacagaagaaaagtccacaagacagacagccacacaggcccctcaactaattccccaggtccagccagaactgtcttggctgcaggtgccctgggttctgcttgaaaaaggcctgtgagctctccgccagtcctcctagggagaagagactaacataaaaatggtcgcatataatccctgcctgggccccaggggtgcctctgcaataactcagctatttgaatcattaaattcacttattactggagcccagataatccttttatgagtctccaccacaatgagataatgcaattttgctgggacagagtcacaagaacacaaaactctttctagttcctgacatagttggttctatgtggcacattgcaaaagtaaagatgctctggatgaaagccatgtgagaaacaggatgcaatatggtcagactcaagctgggaaaaggcgctccttctgcttcagaaaagatgctggaggaacaccaatacttccaccccgcaagatgaggcaacaaggacaggcttccatggacgaactaaaaacagagctgggaggtaaggaccagagacagaagaaaacagcagtggtcgggcgtggtggctcacacctataatctgaacactttgggaggccaaggcagtggatcacctgaagtcaggagttcaagaccaccctggccaaaatggtgaaaccccgtctctgctaaaaatacaaaaattagctgggcgtggtgatgggcacctgtagtcccagctacttggaggctgaggcagaagaattgcttgaacctaagaagtggaggttgcagcgagccgagatggcgccactgcactccagcctgagtgacaggctgagatcccgtcacaaaaaaaaaaaaaagaaagaaaatgaaaaaaacggcagggaaggggatgaactagaggatgggaaagtagtaagactccaagcagaggccagaaaggggcagaacagcaagagacaggaaggtcactgagtgccacatcaaaacatgcaggtcacatgcaagaactgtgtaaacacaccacgcccttaacaagcactgctgtgcggacagggcctgctgttatccagccccaagtcatctgctttatcttggacctcagtcttcttggtcactaaagactgaatcctctgtccaggagtagggattcaaagagctctgtcctttcatccgtgctgtcacatgaaaaaaaaagaagaaaaaggacctctgtccgacactgttctcaacctttctgtcctagtgttaaaaatacgtaacatgcagggtgcagtggcttgggaggccgaggcgggcggatcacctgaggtcaggagtttgagaccagcctggccaacatggcaaaaccctgtctctactaaaaatacaaaaattagccgggcatggtggcaaacccctgtaatcccaggtactcaggaagctgaagcataagaatcacttcaacccaggaggcggaggttgcagtgagccaagatcatgacactgcactccagcctgggcaacagagggggactctgtctcaataaaaaataaaaaatgtaaattaaaatttaaaaaagggccaggcacagtggctagcacctgtaatcccagcactttggaaggccgaggcgggctgatcacttgagatggagttcaagaccagcctggccaacatggtgaaaccctgtctctactaaaaatacaaaaattagccaggcatgggcacctataatcccagccactagggaggctgaggcagaagaatcacttgaacctgggaagtggaggttgcagtgagccaagatcacaccattgcactccagtctgtgtaacggagtgagactccatttcaaaaaatgacaaaaaaaaatctgtaatatgccaggtgcagtggctcacacctgtaatctcagcactttgggaggctgaggctgacagatgattgagcccaggagttcaagaccagcctgagcaacaaagtgagaccctgtctctacaggaaaatcaaaaaattatctatgggtatggtggcacacacccagccaggggaggctgaggccagaggatcacttgagcccaagaggtcaaggctgcaatgagttatgactgcaccactgcactctagcctaggcgacagaggaagaccctgtctccaaaaaaaaaaagtaataatctcatatgatctggtgcttaatgccagagttgaattcttacataagggtaaatgcttaaaaaaacagttttataccctgtcaagtttacctgcaagaattagtttgctggctgggcacagtggctcacacctgtaatcccagcattttgggaggccaaagcgggtggatcactggaggtcaggagtttcagaccagcctggccaacatggtaaaaccccgtctctactaaaaatacaattagctggttgtggtggcccacacctataatcccagctacttgggaggctgaggcacgagaatctcttgaacctgggaggtggaggttgcagtgagccgagatcgggccactgcactccagcctgggcaacagagtgagacctatctcaaaaacaaaacaaacaaaagaattagtttgctattttaaaataacatgcaaagaaaatggactttttcttgtaaaactggaaagataagtgaatcttcttataaaacttcttttaaaaaattccatccctgcctgggctcaaatgatgggaaaatgtacagaaaatccagttgagttagctggagataccaaatacctctaaatgtgagttatctgcagttattctatgaacaggagagccatgtgaggcctcaaactagtatttcagggagcagcgtgcacactcgtggttttgtggtcttcaaccgtcctgctagcccagataagtctgggtggtcaagaaccgtctggtgacagcgtgcagcccagctcagcagaattcagcatgggggaattcagcctccttagagatgcactccctgctgaaatctcactgcgatggccgttcccgcccttccggggctctgaccaaacactctgaccaggaacgcttcccaacagataagcagtattctccatttggtctaatttatgattcagaaggaaaaggcgaaaaacgaaaactttctattcatctatttttcacaccaatggaagcaatgtggtgatgtatgtatgctgttacagtcacttgtgtcctcctgacctataacatttagagatcctgtccatattcttctcaaagcttctcattaaagcacccagccctgcgcctggttccctgcagagatggagtaactgctcacccacttgaacaaaacgatagtggggcattaagaggaagccccagctcccagggagaggtcatctctcacaagagctggaactccactgtccatatccagggtaggtgaggggctaaccccaggtcatagccaagcaagcacaaaggcaaaaagcccaaaacaatcaggatgctcagtgccagcccaacacagtgatagctggaatgggcagggctagagagaagccaggactggaaccagggcgggaccatgcagggagcgggaaagtttggaggagcacaacagcccctccgaatgccaccgcatcaccctgttcccggaccacagggagaagaaccaccatgcaccctccaccagtatcttgggcagatgggcaggagctctagggccgcttctcagtgttcctcagatggagaatcaacctcaggacaaatcaagtctggatccttctgggctgaatcctttctaggattggtacctatcatgacatggtcacattcctccactcctctatgagaggatggagtcattggacaccaacctaatgctggcaaatgacagacaggaagagccccagcagggcagatgccacagaaaccttaactgggacacagaaacatcactaacaaagacccagcagctgtcttggtgagggagacacagtctaacagtcacaaagaggcacaacggagaccctaacccccggccctctgcagacacctctgcctgccctcccagggaagctgccggccaagattatttcaggtcaccaggcaagactgggtgtaacttgggaatgtaagtctatccaatgtcagatccccaggtgcattcctgtccctatggctggtcagaagaagtctctgctcctgctcccatcctgcatcccctccttccaaggcctacgggctgtgcctcctggatctgccccctggatttcactcacgcctgtccaccagcaacacaacaaagcgatctttccagcgccgagctctgcaggattcctcaaaggattcccctgcactccccaccaggtgagccctcaacttctctgctaggtgctcaggacctggcacatctggcctctggccacctttgcagcttcctcaccctctgctgtctccaaagcttcccccgaagggaaagagtattttccctctttccacccattttgtcctgaaaactactatccccctgggaacgaccctatgtagcgtgtgggtggctgagaaccccccttccacacaatggtcaaggccaggagtacccaagccctggcagcaaacacccagcctactgctcacccagttaaaggacggacccctgggtgacagcaggccccggggctcagtacaccggacccttaggccacctcaacaccagtcctcatgccaggctgatctcgaaacgtaacagctactgctcagcaaaacgtggtggctagtgcctgtaatcccaacaccttgggaggccaagacgagagcatggcttgagtccaggagttcaagaccagcctaggcaacctgctagactccatctctacaaaaaaaaaaaaaaaaaattaaaaattagccgtgcatagtggcatgcgcctgtagtcccagctactacagaggctgaggtgaaaggattgcttgagtccaggagtttgaggctgcaatgagctatgatggcatcactgcactccagactagccaacagagccagaccctgtctcaaaaagaaaaaaacgaaaagaaagaaaagaaaaaaaatatccactgctctactcttcggccagtgggaagagtgcattttttaatcaaaataggggcctctatccatgaaacccatcaacttgtaaaatctgagctctctgcagcctcacagtccctccagcactgccagcagccctcgttccctgcatgctctaaatcctcagcgaagacccgtcccttgctccctcgcccagcacaggccgcgagtgcccacgtcccctgcacctcgtggggcagccaagggggcaccgcgtggctcgtgtgctcctgggcagtccattttcaaccacaagacggaacagactcagaatccggaacatctctcggtgcttaagagttttcctttaacaatctttacctgtgggaatgcagagacccccccgccctgcgagaggccggcagccagggattccccgctccgcgccctcatcaccccccggaaaccacaaccgctgcgcgcgcggctcggacccccacccgccgctcccctccagcagaccctaggcctccgggaaaccgcgcggcgaccgccccgcgccccgccagatccgaaccgccggacccggcaccccggccacacccgccggtgtcgacgcagcgaggctcggagggtgcattctccgcgccgaccgctcccctcctccagacccgaggggcggagtgggcagggcgcgccggctgcgcaccgggcacccacctggggacgcgggggctggggcggcgcggggccacctggcggacccgggagcggactccggagagcagggagcccctcccccctcactctccgggccccgcccggccgccgcgccccgaggcgcagccatcccgcgggaggggaggcgcaggaggaggccagcgcgaggacacttacttaaaaggctacatcgcttcattcccagcccatcctgggcgacggcggcacctccctcgtccgctgctgggacctcgatgcccaccaccctcgcgcggcgatctggccctatagcccaccccttactccgccgtggggcggagccgcgccacagctgacccaatgagaaaccgtcgtttcccagagtgacgtgtacgcagagcaatcatggagtccagcccagccgggggcggggctcaggcggctccctacgcttcctactccagctggccccgccccacgcccgcaactgcgcgtgcccagaacgtgaggggcggggctgggagccgggctgacactagaggtggggttagcgcttggaagcaccgaccaacgtgagcgcaacgcggcagggacacctgaccccggcggcgcccagcccctcggattgccagtcactgctcgctttggggcacggaggtgcccagtcctgcggggcacccgacgtcctgtcgccgacagggtccgggagtcagtatagctgggttctagtcccatcacaggcaaaaactccgcgggagcctggcccgctttttacctgggcctcagtttccccatccgtaaaatagaacgggttggatctcccgagcgctaacattccagaactcggatggggcgaaggggagggagggatgggccacccacacgtgacctccccgcgtggagccccgcctaccactgatccagggggtggcagctccggccgggacgagcggggtgggcgggtcctaggaaaccctacccggccgcccttggcagcgcctaaggcggagcgcgcggctctgcagcctgcttgccccggagttggcacccacggaggatggggaccgcaccctcagcttcgcagggagccaccgtggaggccagggcggtgcagagacacgacgtgtgactcggagtgcgcctggggaggatggacgagggagcgggggaccgctaacggggctccctctgcgcgccccgtccgcagaggcgcacgtcgagggtcccgggcgggctccgtggacgttggcggtagcgccgagcgagtcacggaccatgaagagcgttcgtgccgcgcggcccaaggccgggatgggggttagccacatcctgccgcgctgagggggaggctaacgggcgcgggcggccgggcccagccggagcccaccgcgatggcgagggaggagtgcaaggcgctgctggacgggctcaacaagacgactgcgtgctaccaccacctggtgctgaccgtcggtggctcggcggactcgcagaacctgcggcaggagctgcaaaagacgcgccagaaggcgcaggagctggcggtgtccacctgcgcccggctgactgctgtgctgcgcgaccggggcctggccgccgacgagcgcgccgagttcgagcggctctgggtggccttctcgggctgcctggacctgctggaagcggacatgcgacgcgcgctggagctgggcgccgcgttcccgctgcacgcgccgcggcggccgctggtgcgcacaggtgtggctggcgcctcctccggcgtggcggcgcgcgcgctgagcacccgcagcctgcggctcgaggcggagggcgacttcgacgtcgcggacctgcgggagctggagcgcgaggtccttcaggtgggcgagatgatcgacaacatggagatgaaggtcaacgtgccccgctggaccgtgcaagcccggcaggcggcgggcgccgagctcctgtccacggtcagcgccggcccctcctcggtcgtgtccttgcaggagcgcggggggggttgcgaccccaggaaggccctggccgccatccttttcggcgccgtgctgctggcggctgtggccctagccgtgtgcgtggcgaagctgagctgacggacacccgacggccgcctgctgctgccgctccctcccctgagaaaagactcgggatgggtgtggggtctggcctgtgcaaggggagtggtcctaaaaccccgtgtgtgcatgggtacacgcgcgtttccagtgcacatctgcctgggcaggacacggtttcctcttgctggcccgggaggagttaactttgcgccggccgtcagggcattaccgctaacgtctgcaggagctttattccctattaatagaaaaccgtcacagtgaccctagatccctccgagttaatgagttaacacatgtgctgttggggcgtctttacagggagtccgagttcggtgcccacccctgccagcgtcgccccctttctgcgtgggacagtttgaaaaggtgggtggggtggagtgaagtttggagagggacgctgtttggttctatgtggttggtctgtttcccggacaagaaaaattgcaatcaaatgtcagcagcttttattaccttaatctttcagggcctaaatttaggagagtgtcccgagagcagttcatacaaagggctttctctaagacgcgctacagcccttcctagcagagtttatccattcgtccccaagagcagctagaagagatttgaggtcatgacctcccactgccgctcaggggctgaccctatttaggaaaccaaagagggtgggttgaacctactctcacggacttggatccagtgcgcacacttgcctgcggaaaagggctctccccagccacccggagatgggggtaagaggaagagcagaggcttggggtagggccacctggtgtttaaacaggcactttctccttctctggggcttatttttgttcagaactagaccagagtgtttgaacctcctttgcaggagggctgggaatcctctttagagcacttaatcctatttatcccctggaatgtgcgtgctggccagtaggagggctggctttggcagctccctgacccccgcgctgcccgcccctccggggtaatgtggcattactggcccacagaggttttgagccaatcagctctgagactgggttagaatgtaacagctttaacttgggatttaagaagcttttaaaaggtaataatactctgaaagaaaaatgacgtaaccacagcgtgtactatgaaagctgttattttaataaagaacgctgggccatgaactcatacctgccaatgagtcaaacatagtatctttatgtagatacttagattactaaatatatatttcatctacttctgaagttgatagtcttcccccccccccacttttttcttttttgagacagggtctccctctgtcacccaggctggagtgcaatggtgtgattgtggctcactgcagcctccaaatctcgggctcaaactatcctcctacttcagcctcctgagtagctggaactacaggtgtgtgccaccgcacctggctaatgtttttaaggcagttaatttatttatttatttttatttttctttagagataggatcttgtggtgtcgcccaggctggagtgcaggggcgcaatcagcaaaccacagccttgaactcctgggctcaagctctcctcccacctcaccctcccaagtagctgggactaaaggtgtgcatcacggcactcaactaattttttgtagagacagagttgggctatgttgcccaggctggtctcaaactcctggcctcaagtggtcctcccacctaggcctcccaaagtactgggactacaggcataagctactatgctcagtctaaaatcaatattctttatttttttctataatttcactgcaaaataaaatctatattcttgagtagccacacaagtgtaaatgacagaatgttaagtggcctttaattcttttgatcaacaagtaagaaaatgcttggtccttggtcccaggatgacatctgcctgagcagtgctgccaaatcctgcctgtggtccagagagagctctgtcccattcttgggtaagttaggctgtaaaaacagatgcatttaactttcttttctttttcttttttttttttttttttgagatggaattttactcttgttgcccggactggagtgcagtggcgtgatctgggctcactgcaacctctgcctcctgggttcaagcagttctcctgcctcagcctcccgagtagctgggattacaggcgattgccaccatgcccggctaatttttgtatttttggtagagatggggtttcactatgttggccaggctggtcttgaactcctgaactcaggtgatctgcccacgtcagcctcccaaagtgctgggattacaggcgtgagccacctcgccaggccacatttaactttctaaaggtaatttgcaataaattccagagactttggctgaaaactgacaaggattttttttttaattcttttttaccccagaagtgagaacaggggtgaccaggggaaaggaattggccatttttcacatgggccgcttggaggaccaaggggcagaggtggatagcagaagggatgctgtcaggacacccagacttaagattcactctccccccaaccccccactattcctcaggaggaccaagagattccagcagctcagatagggcaaatgtaggatctgtgtttgtgtctgtgatcatgcttttaaaagacccacaaggtcttaagctgattaaatgttttgcaattactttttttttttttttttttttttaagatactgggtctctatgttaccggggctagagtacagtgtcacaatcatagctcactgaagcctcaaactcttgcgcttgagagatcctcctgtctcagcctcctgtctgggactacaggcgtgcaccatcacaccctgcaaatttttaaaatatttttattttttagttcttgtacaaatggagccttcactatgttgcccaggctggtctcaaacacctgggctcaagcagtcctcccacttcagcctcccaaaaccctgagatttataggcgtgaaccaccatgcttagctgacaattactaataacaagaacctcttgcttcacccagtgtgggtgaatctgaataggggccacttcaaattcttttgcacctggttgcccagagtgcctttgaaaatgacatagaacgtttttaagccactcctcccacatatggactctctcgttaccttccccagagtctcatctctggcaagagaaggctgggacatttcattaccctgtgttggaaaatatacctaggccagcacagtggctcaagcctgtaatcccagcactttgggaagctgaggcaggtggatcacctgaggccaggagttcgagaccagcctggccaacatagcgaaacccgatctctactaaaaaatataaaaattagccgggcatggtggcacatgcctatagtcccagctactcaggaggttaaggcaagagagtcgcttgaatgcaggaggtggaggttgcaatgagcaagattgtgccactgcactccagcctgggcaacagagcaagactctgtctcaaaaaaaaaaaagaaagaaaagaaaatgtatctaaaaatgaagtcctaaaggtattctactgtttctaagactgggaacctttgttcttatcaaggtgtttcgggttatgaatttttttttttaaaatggtttagcagaacctattgttgaaacaacccatcagatgtgtgtttcactgagggcagtgggaaaaacaaggtttttctttttgagacagggtctcaatctgtcacccaggctggagtgcagtggtgcaattgtagctcattgcaacttcaaactcctgggcccaagcgatcctccttcctcagcctcctgaattgctgggactacaagcttgcaccaccatgcccggcaggataaacaagtttttgttgttgtcactctttctacccacttggctgatctttgggtatttagttatatgtggatcagatgtgtacttgattctgaaggtcttctgctcgctgaaattagtgataaaatattgcaaaaaaaaaaaaagctgaattacaataaatatactcaccctgttggacctattaacataaacagctctttgagtttgaaaattttaagtattaggggtatttggtattatttggagttatgacattgcctaatagaacttctgctatacgacaagcaaaatcactttctgccttgtgcaataggctgctctctaactagtatctctgctctcatttttatatgtaatgcaagagattgctttctaatagaagcctgattaaattgagatgtttgatgcataagtcattaattttctgtgaacatttagtatgaccttaaactatgatacaagtgtaggaaaaaaaaacaaaaaattcaaactgtgttagctgacactgaaaagacaaaaacttggaatgtcaaggcttttatcatggaaactttgatttcagaagaatgtgatctgggcttttgttattagtaaaaataatatttgtaggagaaaaaaatgcctggcaaattatttttatgtattctaagaacatatgctttttttcttttcttttcttttttttttttttttttttttttttttttgagacaaggtctggctctgtcacccacgctggagtgcagtggcacaactttggatcactgcagcctccacttcctgggcttaagtgatcctcctgcctcagcctcccaagtagctgggattacaggcgcccagctaatttttttttttttttttgtagagatggggtttcaccatgttgcccaggcttgtcttgaacatctgagctcaagcaatccactagcctcggcctcccaaagtgctgggataaccagcatgagccaccacgcctagctgcttttttttttttttttttttttttttgagacggagtctcgctctgtcacccaggctggagtacagtggcaagatcatgactcggtgcagccttgaattcctgggctccagtgattcttccactttagtctctcgagtagctggcactacaggtgcatgccaccacacccagctaatttattttaaaaattttgtgtagatatggggtttccctatgttgcccaggctatcttgaactcctgggttcaagtgatcctcccagctctgtctcccaaagttctgggattacaggcatgagctattgtgcacaagctaagaatatgtgcttttaaatcccataaggaaaaaaatatttttggtaaataaaattaaagcataaatatcatgatttacctgacgtttaccgtaagcaacataaaagatatgtgatactgaatgactaaaaagtagttttggttaaagagagttctagtttccatgaggactctgacaatgctgcattttattttgctttttaatgtgcacattggtacatgtttaactactctactcctgttcaaaatgtacttctctgttctgcaatgaatgctttttaagggtgcgagccccagggcgtgaaatgaatgtggtagaactggcctctacatttcttttgggtgtgtctcctcctgcaaggcctggccagctgcgatgggcagaggacactgcctcgctctccaagtacctcaataagtcattgacctacttgtgcctcatgtctctcatttgcaaaatgagggtcctacctgattaactcaaagattccccttctagagcttaaaacattgaacaaaatgcagttaaacaagaaagggctatgtttgttggttttgtttttgtcttttttggtgtagttggttggttttgtgtataatggaatggaatcatatcatttgctggttattgtctaatattagtttcaaaaactaataaaaatactttaaacttcaaattaattttcaaaatcagaagtaactaagcatatcatgctttcagtgcacatcagaattagtgtatgggcttaaaagcaaatgtgtgtaaatgctacttattggtagtatttaaattagattaggaatttaaattcaggctctaagtcggagtctaagaaagcccactgattattaaaacagtctgttttacccagcaatccaggccacctgaacatcagagcctgggaaacagtagataggaagctctgtcatttgtcttggaggctgggagaatcctatcccataagtaacttggtagccttagaactgcatgagctgctttaccactgggaaacacgagcacagcctagcttgattttgtatgtggtatcagatctaaggtggatggaattcaggacttcctgtctactctttgattttgttttatttttagaaatgttttattttgttttattcatttattcatcttcagagacatggtctggctctgttgcccaggatggagtgcatggtgtgatcataggccactgcagtgttgagctcccaggctcaagcgatcctcctgcctcagcctccttagtagctgggactataggcacatgccctaccatgcctggctttgtctactttttgaatgatgtctcaaactagaaggtctattaatttaaaaaattaaggatagcatgccataattaaaaataataacagtgggaaaaggcaccttccaatgattcagacatcaacttgtgatttaaaaaaacgaaaaataaataataggaaaaaaaggggaaaaagttaaataaaaataaaattaaaaaaaaaaaaagaaacagggccttgctatgtagcccaagctggtctcaaactcctggcctcacgtgatcctccaccaaagtgctgggattacaggtaggagccactgtgcccagcctcaacttgtgattttttttttttgagacagagtctcacactgtcacccgggctggagtgcagtggtgaaatcatggctcactgcaacctccacctcctgggttcaaggatgagccaccacacctggcctcttcttttttcctttgagatggagtttcattcttgtttcccaggctggagtgcaatggcatgatctcggctcactgcaatctctgcctcctgagttcaagcaattctcctgcctcaacttcccaagtagctgggattacaggcatctgccaccacacccagctaattttttgtgtttttagtagagatggagtttcaccatgttggccaggctggtctcaagctcctgaactcaggtgatccacccgcctcagcctcccagagtgttgggattacaggcataagccactgcacctggccttttaaaaatatatatattcttaatttttgatatttgagtgggagtgaacatcctgatcaatgtatttacccttcacagatttcattacataagaagatgttcaggattataaatctccaagtgcttttctgcaatgtgatttttttttctgagacagtctcactcccgttgcccacactgaaatgcggtggcacgatcacgccttactacagcctctacttcctgggcttaggtgatcctcctacttcaacctcctgagtagctgggactacacatgtggtgccaccatgcccggctaatttttatatttctagtagagacagggtctcactatgttgcccaggctgttctcaaactcctgggctcaagcaatctgcctgcctgcttcagcctcccaaagtgctgggatgacaggtgtgagccaccctgcccagcccagcccacaatatgattatactcagattttaatgcaggatgcaatccaagaagataggtctccatatgaaagatctttggctatggtcaacacagatcaaagtcatatttcaaatattgttttttctggctgttaggaactgactgaaggtcatgttgcagtcttctctccatgaggacaagatgaataatatctggaaagatgtttttctcacttatttttcatctaattccatagaagagattctggatgtttttatcgcagtaccatgagatcttgggcatacttgttctttggtgtttgagaattttttttttttttttttttttgagacagagccttgctctgtcaacccaggctggagtgcagtggtgcgatctcagctcactacagcctccacctcccgggttcaacattcccatgcctcagcctccagactacctgggattacaggtgcatgccaccatgcccggataatttttgtatttgctagagatggggtttcaccatgttggccaggctggtctcaaactcctgatctcaagtgatctgcctgctttggccccccaaagtgctgggagtacagatgtgaaccaccgcactggctcgagaattttaaaactttaaggcttattaagaccaatgtaaataagccaaataagagctcctgttgtcaaaaggatttaaagagtacttctggccaggtgcagtggctcacgcctgtaattcccagcactttgggaggctgaggtgggcagatcacttgaggtcagcagttcgagaccagcctggccaacatggtgaaaccccatctctactaaaaatacaaaaattagccgggcgtggtggcatgcatctataatcccagctacttgggaggctgaggcagaagaatcacttgaagccaggcaacagaggttacagtgagccgagatcacaccactgtgctccagcctggacgacagagtgagactctgtttcaaaaatacatatatttaggctgggcgcggtggctcacgcctgtaatcccagcactttgggaggccgaggcgggtggatcatgaggtcaggagatcgagaccatcctggctaacaaggtgaaaccccgtctctactaaaaatacaaaaaattagccgggcgcggtggcgggcgcctgtagtcccagctactcgggaggctgaggcaggagaatggcgtgaacccgggaggcggagcttgcagtgagccgagattgcgccactgcagtccgcagtccggcctgggcgacagagcgagactccgtctcaaaaaaaaaaaaaaaatacatatatttaaagagtacttttaatatgctagtaccagaaagcaaagttgagtgtcccctgcttgtatgtacgtattaggcatatggaaagatctacagggaagtaaagaaataaaaatattattaatatatattaatattaacaaagtggtaggattatgaatggtgtttttcagtatttttccggaatgagattatattgttcttacgataaaattttgaataattttgtcatctagaaaatattattctgttgtttaaattggaatcccagctacctgggaggctgaggcaggagaatcacttgaacctgggaggcacagcttgcagtgagttgagatcatgccactgcactccagcctgggcgacagagcaaaactccatctcaaaaacaaacaaaacaaaagtaaatacaggccagttgtggtggctcacgcctataatcccagcactttgggaggctgaggcaggtggatcacctgaggtcaggagtttgagatcagcctggccaacacagtgaaaccctgtctccactaaaaatacaaaaattagcctggtgtggtggtgcacgcctgtagtcccacctactagggaggctgaggcacaagaatcacttgaaccagggaggcagaggttgcagtgagctgagattgcaccactgcactccagcctgagcgacagagtgagactctgtctaaaaaaaaaaaaagtaaacacagttaaattcactctaaacatgtgcaataatgtaccaataatgtaaacactactacagccaagaagatatagaacatttccatcacccctaaaaagctcccccatgtcactttgtagttctcatccaaaacaccatgggatatcagtttgtaaaggtctctctcttcaaagagggaaagggcaggttgggttttatgcatcccagggtctgtattacacaagaaagtcatattcagcaggttttgggggaaagctgtacatatttatgagggggttgaccacatgtgcaatgggtaaacatacaggtaacatacatcacccatgtttattttggagcaagtttgtgtcaggcgtttgaaccagagcaactccatcttgtataggggctggacaaaatgaggctgagactggtacaggagttaagaagaatttacttaggcagatagtgaaggcatggaagtcctccgtaaagttttcctttctaacgaagagcagcctgtaaaatccagctgcagacatagatccgacagttgtgccactcctgttgaagatggcggctccatcttcccttctctttgtcggccacatgtactgtaagaagcagacaagatgacaccaatcaactggaaagcccatttgcatgataagattagggtggggtgaccagccttccccaagatcatgccactgcactccagcctggggtgacagaatgagtgagaccctgtctcaaaaaaaaaaaaaaaaaaaaatgccaggcacagtggctcaggcctgtaatcccagcactttgggaggccaaggcgggtggatcacatgaggtcaggagttcaagaccagcctggccaagatggtgcaaccctgtctctactagaaatataaaaattagccagatgcggtggcaggcacctgtaatcccagctacttgggaggctgaggcaggagaatggcttgaacccaggaggcggaggttgcagtgagccgagatcatgccactgcactctagcctgggcaacaggagcaagactcctcataaaaataaaggctcatgttgctgcgttagctcatgtctgtaattccagcactttgcaaggccgaggcaagtggattggttgagcccaggagttcaacaccagcctgggcaacaaagcaaaaccttatctctacaaaacatacaaaaattagcccgttgtggtgctgtagtcccagctactcaggaggctgaggtgggaggaccacttgagcctgggggtgtccaggctctggtcagctgtgatagcatcactgcacctgggccgcagagtgagaccctgtctcaaaaaaaaaaaaaatgaataaccacctaaaaataatttctcagaatgatttttaaaaaggttttttttcttttttcttttcttttctttttttttttttttgagatggagtctaagtctgtcgcccaggatggagtgcagtggtatgatcttggctcactgcaacctctgccacctgggttcaagcaattcttctgcgccaccatacccagctaatttttgtatttttagtagagacggggtttcaccctgttgaccaggctgggctcaactcctgacctcaggtgatccacacatcttggcctcccaaagtattgggattgccaggtatgagccactgtgcccagcctgaagtgtaacttttgaggctaagtcataaaaggcatcatggcttcttcctctctcatggatcattctttctgggagaagtttacccaccaagtcctgaagacattgaagcaaccctatggaaagatccatgcggtaaggaactaggccccctgccaacagccatgtgagtgagccattgaggaagtggatctcccagtgctggacaagccctggctgacatgctgatcacagcctcatgggagatactgagttaggatcaccacatggaggtggtccctaatccctgatcaacagaaaaggtgggataatcaatgtccattgttttttgtttgtttttcttgttttttttgttttgttttgcttttgattttgaaacagagtcttgctctctcacctaggctgcagtgcagtagcactatctcagctcactgcaacctctgcctcccgggttcaagcgattctcctgcctcagcctcccgagtagctgggattacaggtgcccacgaccacacccagctaatttttatttttattttttgtatttttagtagagacggggtctcaccatgttggccaggctggcctcaaacttgtgacctcaggtgatccacccacctcggcctcccaaagtgctgggattacaggtgtgagccactgtgccccatctttttttttcttttgaggcagagtcttgctctgtcacccaggtcggagtgcagtggcgtgatcatggctcactgcagcctccaactcctgggcccaagcgatcctcccatctcagcctcttgagtagctgggactacaggcatgtgataccacacccagctaattttctttttcttttttttttttttgagacggagtctcactctgtcacccaggctggagtgcagtggcgcaatctcagctcactgcaagctctgcctcccgggttcttgccattctcctgcctcagcctcctgagtagctgggactacaggcgcctgccaccacacccggctaattttttgtatttttagtagagatggggtttcaccgtgttagccaggatggtctcgatctcctgacctgtgatccgcccaccttggcctcccaaagtgctgtgattataggcgtgagccactgcacctccccactaattttcttttaagaggaggggtctcactgtgtttcccaggctggtcttgaattcctggcctcaagttatcctcccgcctcgccctccctaagtgttagggttacagacattacccaccatgcctggacaataagtgtttattgatttaatccaccaagtttttgactaatttgttaacagcattaggtaaataacatatccacaaattatcctgtgagcagagcactttagatatgaatatgatatctgtatctctttgaatgctcatggatagttctttgcttctgtatcatttcttggctacagttcagataactgagtttatatgacatgatctctgaatccataaactgtaattgtgtcatctcagtgccccaaatatgacagtcatggcagtgtgcacattttggacactgttctgtgttggttaaggtccagtttctgccaggtgtggtggctcacacctgtaatcccagcactttgggaggctgaggtaggcagatcacttgaggtcaggcgttagagaccagcctcaccaacatgatgaaaccttgtctctgctaaaaatacaaaaattagtcaggcgtagtagcatgcgcctgcaatcccagctactccagaggctgaggcaggagaattgcttgaacccgagaggcagatattgcagtaagccgagatcgcaccactgcactccagcctggtgagagcgccagactccctctcaaaaaaaaaaaaggttcagtttctgttgttttgctatgcacccaggaccaggacttggtcatctcactcatgagtaaccagcttctgtgaaaaccagctgatgttgaaacacacacattcacctacaaaaccacggtgttattttacagcaaagggagtagtatgttcttaagacccttaatccctccataaatggttagtcatctgtaaaatagtggtaactgtttccacttcatggggttttgtaagaattacacaactaatactaataaagttcctagtgcctcacacactgtacccagtaactactaatattattatcccctaggattattattactcctagtattgaagacatgttactttaatcacctgagtgcctttctctccattgctctgtatttttattttatttatttatttatttttttgagacagagtctcgctctgtcacccatgccggaatgcagtggcaggatcttggctcacagcaacctccacccagattcaagtgattctcctgcctcagcctcctgagtagctgcaactataggcgcgggccgccacacccagctaatttttgtatttttagtagaggcggggttttgccatgttggccatgctggtcttgaagtcctggcctcaggtgatccgaccacctcggcctcccaaagtgctgggattacaggtgtaagccacagcgcctggccagagaccaggtctcttcaaacaaaaaaacaaacaaaacccctaaatattgacaatgtcatctgtggattctacccaggaaataacccacattaaaatgatggtttgtgagggtcggcaggggtatagtgtatttcatccaaaaacataacaaatgtgtgatccaattataatagcaattatgggaaaagctgtcggtgactgataaggagttataaaagaaaagactcaaatttacacaggcttttcaaaagatcataatcctgctattggaggtggaagtcttctagacactaacaaggtggagagaaatctccatgtggaggcccagattaaacatctcccatcaaagtggaactcgtcaaatgtcctaagacacctaaggccgtccccaggcgccctgacaataaaaggtaaccagaacacgagagaaattactctgggagtacctttcacattcaaggtgtgcagtaggaaatttataaattggcatctggctcgtccattcatttctcattggtgtggttcacgtgtgcttgcaaaggtcagacttctgcccttcgaatgtcctctctccctctcccacagaaaacacccacatgtgggtccttgtttaaagcagaaagtcctagtccttagcttttagtgaggtggatgtcatcaggcctgggttggcatcctgttttttaccatggcaagtcatatgcgcccttaagcattcctgcttttggtccaagcttcctgcgtgggaatactgcggtcctcctttcaggcagctgtgaatgacaaacggtcgctggctgccgtgacacccattgtcccgcgagagtgccctagctgggccccagtgcactcgaggcggtccctgctcgggtgcccctcccacaggcaggcgccgttgccgaccaaacgcccaggttcacccaacgccagaggctcgtcctcaattcccgcgaggcccccggaggtgctggggtccctgcagggccgggccacctgccgtggagctcaggccgcgccagaatcggatccgggaagctgcgcgccatgagcagctccctgcggccgggccccagccgctggcggcgggcggccagcatcgtcctggcggctggctggtcgcgcccggagaccgccaccccgccgtcgcgcccgccgccggccgagggcttccggctgctgctgctgcagcgctccccgcaccaaggcttcatgccgggcgcgcacgtcttctccggcggagtgctggatgcggccgaccgctcggcggactggctgggcctcttcgcgccgcaccacgggccgccgcgcttcggcctgggcccggcgccattcagccgcaccgctttcccgtcgctgcccgacaccgatgaccacaagaccgacaacactgggacgctgcctgaggacgtagccttccgcatctgcgccgtgcgggaggcctttgaggaggcgggcgtgctgctgctgcggcccaggacttccccaccaggcccagcacccgggcctggcctcgccctggagccaccgccgggcctggcctcctggcgcgaccgcgtgcgccaggacccgcgccacttcctgcggctgtgcgcccacctcgactgcacacccgacatctgggcgctgcacaactggagcgcctggctcacccctttcttgcggggcaccactcgccgctttgacacggccttcttcctgtgctgcctgcgcgagccgccgcccgtctaccccgacttggcggaggtggtgggctaccaggtaaggcctgctcagggccttgctgcggaccgccaggacgtgagagggaggacccctcccagcggcccaggcccccaagggacccccgcataggccaagcccagagagattaagcagcaaggaacgcttagacgggctggaaactctcacccctgtagaccaaagccatgctcttggtgaagtgctctctgctttcctaggctttggggtctcaaggcctggagcctgtctctccacgtggttcctccagcgtggccactgtgtaagcacttgtacatgtgtagacatagtacatctccacagccgtttaatttggttttcttggagaacagacttaatatgatccagtcttcctatttttatttatttttggtacagatgggggtcttgtctctctgtgttgcacacccaggctcgtctccagctcctggtgtgtccagaattggttccttccagtgggttcttggtctcgctgactttaagaataaagccgcggaccctcgaagtgagtgttacagttcttaaagatggtgtgtccagtttcttccttcagatgttcagatgtgtctggagtttcttccttctggtaggttcgtggtctcgctgacttcaggattgaagccgcagaccttcgcagtgagtgttacagctcttaaaggtggtgcgtcaggagttgtttgttcctcttggtgggtttgtggtctcgctggcttcaggagcgaagctgcagacatttgtggtcagtgttacagcttataaaggtagtgcggacccaaggagtgagcagcagcaagatttattgcaaagagcaaaagaacaaacctcccacagcggaaggggatcagagcaggttgggtgctggtggctgggtggccagcttttattcccttatttggccctgcccatgtcctgctgattggtccattttgcagagtgctgattggtccatttttacagagtgcggattggtgcgtttacaaatctttagctagacagagcactgattggtgcgtttttacatagtactgattggtgcatttacaaacctttagctagacacagagcactgattggtgcgtttttacagagtgctgattggtgcatttacaaatctttagctagacagaaaagttctccaagtccccactggacccaggaagtccaggggcttcacctctcaatcccgcctctaaacagggcaccccatctgctgttgggaattgggcaatgactgctctagctacttcctgctggacaggggcaaagaaggggccctgcagttgtagtgtcctccagaggggaactctctaggccagtgaaagggccagtgggtcggtccaggggtcctcggtagaagttgttagttgagctcatttgggtttccgtttgtaagaccatctgtagtttgatggccttgattctagaggaaacaaatttgacaaggaggttaaaaatacagggcccgaaggcgagtaatagtaaaacggctgtcacaggatgtagaaaggggagaagccatgttgcccaactccagaggttggtataagagtttgaaaggcgttgtctgatttcagaaaccttttcctgtaaatgccgggcggcatcttgcactatccctgacttgttagtgtaaaaacaacactcttcccctaaggtgcaaagtcctcctttctcagcagtgaggaggtctaggcctcgggggttttggagagtcactgctgccagagtctatttgggattgtagttactatccttactgaatagattttgttatttcttgcaaactgtctgagaaatactttgagagtgtgtggtagtaagataatgaagtagataaactggctattccggttcctgtagcagtggccatttctagccctataagtaggggtatcagttgtatggccctgtgctgatggacttgagctttgaggggcactgatagggtctgatgtccataagattagaagttaggataatatgtgttacactgttaacttttagcaaactttacttttgttgaaaaccttaagtttgggatttcaattattctttgctattaataagacctcgttcagtccatattcacttaaaattggtatagatggctccttcctgattctgtaagtactttaaggtttggctgagtgcaaacagcttgcacatttgagcagaccaattattaggcaattttcctaactctgcttctgtaagagtttccttatcacgtactgagtacccattgtgtctttttccttaatcgcccaggaggaaacatctatcatcctgtcctgaagggggttcctcctatgtctggtcagaccttcagatttagatcccctgttaggaacctgctgggttaaggatttttgataggaaggctacaggttgtcagtggcctcagtgcttttgggctatgcccttgtttacactgacaacaaggtggtattggagtgttacagggttacagagaagaccttcaattatcaattgtaggttttatttttcatttttatttttttggagatggagtcttgccctgtcacccaggctggagtgcagtggcatgatctaggctcaccgcaacctctgcttcccgggttcaagcaattctcctgcctcagcctctggagtagctggaattacaggcgcccgccaccacacctggctaatttttgtatttttagtagagacggggtttcaccatgttggccaagttggtctcaaactcctgacctcatgatctgcccgccttggcctcccaaagtgctgggattacaggcatgaattatatattttaaatttaccctggcttttaaaggaatagggtgcactgttttttctttactacttctatctctttctctctgactcctttgtctcttcctctctttccttctgtctttgactttgcctctttctctctgctggtctttccctgcctctgccagccgcttatgctgccgttctcccttctccttcccctttttgatggcttcggcagtgtaagactgccacctccttgggtttttgcattgagtgcaataactccatgatttccttgtggtatttaatgggggttcccccagaggttaggaacgctctttctttacatattgcagcatgggcatgtaggattagataagcatacttgctatctgtatacacgttttttcttttttcctttcccagttctaaggctcgggtaagtgccactagttctgctaactgggtgctggtccctgggggaagaggtttactttcaagtacggttacatcactaactgtggcataacctgcccttcgtatcccattttccacaaatgaacttccatcggtatataggttaaggtcaggattagctaacgggacttctaagagatcctttcaggcggcataagtctggactactacctgttggcagccatgcttgacccgctccctatcctctgggagaaaagtggcagggctgagggccacacatgtatgcacttgaagcactggtcactcaaggagtagtgcctggtatctaagcaggtggttttctgatagccataaacttcctttggcacctagtttgccatttacatcatgagtagtccagacagtgagatcctttccttgtattattttgatagcctctgacactaagacagccactgccacaactacccctaaacagttagtctagccttttgctactgtatcagtttccttaggtatgccactggttgtggagttgtcccatgagtctgagtaaggaccccaagagctattcctgctctctctgtgacgtttaaagaaaagtttcgtcctgtgggaaggcttaaggctagagcttgagtttgttccttccaatgcccagacttcagggttgattccctccccaagcaggggacaacaaatgggtaacttgttccccatattcatgtagataatagctccagctttggctaatatatccctccctaataagggtgtgggactttcaggcataacaagaaaggcatgtgaaaggagcaaagtctcccaattacaactgaggaggtgggagaaatacctggttacagcctgtcccaggattcctcggatggtaacagaccttgaggacagctccaagacaggaaattaacactgagaaagccacgccagtgtccaggaggaagtcaatttcctggccctcaatggttatacatacccaggactcagtgagagtgatgacatgagctggtgctttccctgggcaccctcagtcttgttgcatcatctggttggtggcttctgtcccagagaacctttgtcctctggggcagtgtgtcttccagtgattgcctcggcatagtggacatgggcgagggggcagcttgtttctcataggacaatcttttttttaaaaagtgtccttgtaaaccacactgataacaagccctaccaggtgattggcctgctccattctctgtcccctctgaaccaccaaggtttgtttgtctgagggccatgactaagtctgcggcctttctattatctcacttttacttttgggcctgtccatcttggtccctattatagaacactgaggttgccaggtttaataatgcttccagagtttgttcagggcccagggctcgcttttggagctttctcctgatatccacagatgattgggtaataaacttgtcttttaggatcaattgaccctcaagtgagtcgggtgacaggggagtgtattttcttaaggcctcccgtagctgctcgtggaaggcagaagcattttcttcctttccctgagttatggtggacatcattgaataattcatgggctttttcctaatactccttagtccttctagaacacaagtcagcagatgtttacgactccagtccccatgatctgagtcgaggtcccagtggggatccatactgacttactgacatacggcttgctgactagtaaggaatttgtccctttcttcaactgtcattctatcatttactggactaagataccaggtatctccaaactcttgggctgcagctaaagccacattcttttcattaaaggccagggtttgatctaacactagcatgacatctctccaagtgagatagaaggtttgccctcgaccctgtaggacatctgtatacctatcaagatcatctgaaagcttcccaaggtctgccttgatctgcttaaaatcagagagggagaagggaacatgtacctaggttgggccaaattccgctccccctacagcttgaaggggacataaccgatagcccgggaagggggcgtttgtgatcctttggagatttctttgcttatttccttctgggcagcggacattagaggaggattatcattaataggaaggggagctatagggaggctaggatatggaggtaagctgagaggtcctcctgtgggatgtaaattgcaagctttgcatacttgggtattctccttcaatgaaaagaaaacttagacataaggtatttcactccatttgccttccctcttacagaaaaggtcaggctgcaggatagtactgtagtttatacttccctcaggtggccatttttccccatcagagagagaaattggggccaggctgtagtatagaaaaaaatgagccacctctttttcagggtttgtgggtcaaattggtcccagtggcttaggatgcatttcaagggtgagcctgttgatgcctgagtgtttcccatctgaaagacaaaaccgcctgtggttttggtttgtttgtttctccccctgcccaagaacctgcaacggtccctggaccctgctgatcggaatagttgtgctcaccaatgcagcagcagaaacacctcttgcccaagaacctgcaacagtccccggaccctgctgattggagtagttgtgctcaccaacgcagcagcagaaacaacccctgcccaagaacccgcaacagtccctggaccctgctgatcagaatggttgtgctcactgacacagcagcagaaacactagttctcctagaccacaaggaggaatgaggaaggtcagatttcgtggcccttaccaacacattctcgaaaacctgcgccctttcctgtcctcctagacctcaaagaggactgagaaaaatcagatttagtggcccttactgatgcattcttggaaaactgttggagtcctaagcattctcctgttagtattgggaccttacccatgtcctataaagatgttatgcccccaaaatgaagtggagggccataccctgagggagggaagggatctccagagttggaagagtgaagccttttatccccagttatatgaataggaaggatacaatttctgaggctcccgatatcctagtttcaggaatagcttttgttaggcctgcttttctgaggagggattctaaaattccagataatcccccctacgatggggctttgagcaaaaactgtgtctttctgattggtgagcccgggtgtctaaagaaggtaacagagtcctgaagtttatcctagaaatcattcttacaggagaaactagaaaagcaccagagatggagtggtttttagaagtgggactagcctcaaagaaaggcgagaggaagtttgtctgacaggcattaggacccaggaggcaagggtcaggatagataggatagatgggtgagtctcgcctgtgcgacgtgactttcagagttccattcatggctgcagggtcaaccaacttgttgtcgggaccccggagctgaatggctttcctcgctgtcgaccctcggctcagcccagaagtacaggaaaagcagaagctggttccaggcaaaccaacgctccccactccgaagagtcgggggttgttagccctttcccagaaagcctgacacccgtgtctttagttcagcagccacactagtcgcttttaactggccaacatgtccccatatttagctctcaaattctaaggaaaaataggacagaatagcaagcgaaaggggtccaaaggcactcaccgcttagtgataggtaatagtcccttcgtggtcaccaaaatgtgtccagaattggttccttctggtgggttcttggtttcgctgacttcaagaatgaagctgcagacccttgcggtgagtgttacagttcttaaagatggtgtgtctggagtttgttccttcagatattcagatgtgtccggagtttctttcgttgggttcgtggtctcactgactttaggagtgaagccacagacctttgcagtgagtgttacagctcttaaaggtggcatgtctggagttgtttgttcctcctggtgcgttcctggtctcgctggcttggagtgaagctgcagaccttcgcggtgagtgttacagctcataaaggtagtgtaaacccaaagagtgagcagcagcaagatttattgcgaagagcaaaagaacagagcttccacagcatggaaagggacccgagcgggttgctgctgctggcttgggtggccagcttttattcccttatttggccctgcccacatcctgctgattggtccattttacagagcgctgattggtccattttacagagtgctgagtggtccattttacacagtgctgattggtccgtttttacagagtgctaattggtgtatttacaaacctttagctagacacagagtgctgattggtgcgtttttacagagtactgattggtgcgtttacaaaccttgagctagacacagagtgctgattggtgcatttttacagagtgctgattggtgcatttacaaacctttagctagacagaaaagttctccaagtccccactcgacccaggaagtccagctggcttcacctctcactgggctgaagtgattctcgtctcagcttcccgggtagctgggcccacaggcacctgcaaccacgcttggctaattgttttattttttgtagagaccggatctcactatgttgctcagggaggtcttgaactcctggcctcaagcgaccgtccagcttcagcctcccaaagtcttggggattattggcataagctactgtgcctggccagtttcagtcttttaaaatttattggccagtacagtgactgatacctataatctcagcattttgggagaagaaggccagaggatcaattgagctcaagaactcaagacctgcctggactgtaacatactaagacctcatatctagaaaaaattttaaaacttagctgggcatggtggtacatgcctgtggttcctgttactgaggaagctgaggtgagaggatcccttgagcctgggaggttgaggctgcagtgagctatgatcacaccactgcacttcagcctggacaacagagtcaggccctttctcaaaaaaaaaaaaaaattattgagacttgttttatggccatgaatatgttctatcttggtgaatgttccctttgcacctaagaagaatatgtattctgctatttgttggtattttggtaaaaatgtaaaattaggttgagttgttcatagcatcttgcaggttttttttttttttttttttttttgaaacagagtcttgctctgtcacccaggctggaatgcagtggtctgatcttggctcactgaaacctctgcctcccaggttcaagcgattctccttcctcagtctcccaagcagctgggattacgggcgcctgccaccatgcctagctaatttttgtatttttagtagggacgggtttcactgggttggtcaggccaactcctgacctcaggtgatccacctgtctgggcctcccaaagtgctgggattacaggcgtgagccactgtgcctggccagtcttgcaagtcttctatatcatttccttgtttcatcaggtgctgagagaggaatgtggaaatcttcaactaataattgtggagttgtctttttcaccttttagttctatcagatttggcttcatgtattttgaagctcccatgtaaggtactgactgtatctacatttaggacttttaaaagttcatggattaactctttgatgattatgaaatatccttctttattcctggttataatctttattctgaaatctgaagtttactctgtttgatattaatatagcccctctgactttcttttgattcatgttagtatatttttctatccttttaaactatctgtgtctttattatttaaagtgtgtttctggctgggtgcagtggcttacacctataatcccaacactttgggaggccaaggagggctgatcacctgagttcaggagtttgagaccagcccagcaacatagcgaaaccccatctatattaaaaatacaaaaattatccaggtgtgcgggggtctgtcctgcagaccctgacccaatgatggatgaataacgtgcactgatacagatactctgctttgccagtctgactgagcatcagggctacttacagactcccaggagagtgctgtaaaaagttgcgacctgggccttgaccagccagccagactcatgtttattcagtaaagattaattgacaaaggcttgagtcaacaccattagagggtaattgaccttgcagacatcccagatagaaagcaattaagcacctgcggtagatccaaggttagtcttaggaccacatgagtaaacaagctagttagataaactccccacattcctttgtatctactttaatttatttaattaaaggtaagcggactaggctgccttcagccagatctgttaccgaagttatgcaactctcaggccttccaagagggtttctggctattataactaaattttttcccaccagcctgactgaaccctcacacaggtggagacaggagaattgcttgaacccaggaggcagcggtagcagtgagccaagatcatgccactgcactccagcctgggtgacagagcgagactccatctccaaaaagagaaaaaaaagtgtgtttcttgcaggcagcatatagtcttgctttttatccaatataaaaacttttgctttttagttggagtgtttatttaaatttgttattgtcaataaggttagattcatatctaccatcttactgctcattttttgttcccatctatttgtactgtttttcttatgactgttttatttccattattaacttattaactatgtctctttgtagttgctctaaaatttgcaatatacatttttcatttcgtttatagagttagaaccttgcagcaatatacttatttgttccctcctgtcctttatgctattgttgtcatacatttgacttttattataaactctacaatacactgtgattatttttgctttagaccatcaatttttttttttgagacagtgtttcactcttgttgcccaggttagagtgcagtggcatgatcttggctcactgcaacctccacctcctgggttcaagtgattctcctgcctcagcttccccagtagctgggattgtaggcatacgccaccacgcccagctgattttgtatttttaggagaaacgggttttctccgtgttggtcaggctgctgtcgaactcccaacctcaggtaatccgcacacctcggcctcccaaagtgctgggattacaggcatcagccaccacacccagcctagaccatcagtcttaatgagaaaaaatgtcttatgtttacctgcatatttactatttttttattgagatggagtttcattcttgttccccaggctgcagtgcaatggtgccatctcagctcaccacagcctctgccttctgggttcaagtgattctcctgcctcagcctcccaggtagctaggattacaggcatgcacccaccatggccagccaattttgtattttcagtagagatggggtttctccatgttggtcaggctggtcttgaactcctgacctcaggtgatccacctgcctcagcctcccaaaatgttgagatcacaggtgtgggccactgtgcccagccttttttttttttttttttttttttttttttttgagacggagtctcactctgtcacccaggctggagtgcagtggcatgatcttggctcactacaacctccgcctctctggttcaagtgattctcctgcctcagcctcccgagtagctgagattacaggcacccaccaccatgcccagctactttttgtacttttagtagagatgagttttcaccatgttggccaggctgatctcaaactcctgacctcaggtgatccacccagctgggcctcccaaagtgctgggatcacaggcatgagccaccatgcccagccacatatttactatttttagcactctttattcctttgtgtagctctaaatctatctctggtatccttctgcctaaagaagtttctctaatatttcttgtagtatagatcctgtgacaatgaatcctctaacttttgcttgcttgaaaataactattttgcctttgtttttgaaagatactttggctaggtataaaattctaggttgataggtttttttccttatgtacctaaaaatattgctcccttatttgctagtttgcataaatttcttaggagaggtctgttaccactcttgcaggtaactttttttttttttttagacagagtcttgctctgccgcccaggctggagtgcaatggcacgatcttggctcactgcaacctctgcctcccagattcaagcaattctcctgcctcagcctcctgagtagctgggattacaggcgcatgccaccatgcccagctaagttttgcatttttagtagagacggggtttcgccatgttggtcaggctggtctcgaactcctgaccttgtgatccgcctgccttggcctcccaaagtactgggattacaggcgtgagccaccatgcccagcctcttgcaggtaatattttttatttctttcatcatgttgatcttttcctttgtatctttacagcattgtttttaatgcccttttctgctaacttaatccttgctataatttctgggtctgtttctgttgacttattttttttctagttttggatgacgttttcccacttcatcatgtcttgcaatttttattgaatgttggatattgtgactttatgttgttgagtgctgaatcttgtcacattccttaaagagtattggactttgggccgggcatggtggttcacacctataatcccagcactttgggaggccaaggcgggtagatcacctgaggtcagaagttctagaccagcctggccaacatggtgaaaccccgtctcaagtaaaaatacaaaaattagctgggcatggtggcaggcacctgtaatcccagctacttggggggccaaggcagaagaatcggttgaacctgggaggcagagatgcagtgagccgagatcacgccatcgcactccagcctgggggacaagagcaagacttcatctcaaaaaaaaaaaaaaaaaaaaaagtattggaacttggctgggtgcagtgactcacgcctgtaactccagcactttgggaggccaaggtgggtggatcacgaggtcagcagttcaagaccagccttgccaacattgtgaaaccccatttctactaaaaataccaaaaaaattagccagtcatggtggtgggcgcctatagttctagctactctggaggctgaagcaggagaatcgcttgaacccaggaggcagaggttgcagtgagatgagatcacagcactgcactccagcctgggtgacagagcgagactctgtctcaaaaaaaaaaaagaaaaacaaaaagagagtattggacatttcctagcaagcagttaagtgattgcaaattaccttaattgtcttgaggtttaattttaaatgattttaagtgattttagcatgggcctatagtagcctttattctagagctaatttagctgcactttttttttttttttgagacatactttcactctgccacccaggctggagtgcagtggcgtggtcttggctcactgcaacctcctcctccctggttcaggtgattctcatgccttagcctcctgagtagctgggattgcaggcacatgccaccatgcctggctaatttttgtatttttagtagagtccgagtttcaccatgttggccaggttggtcttgaactcctgacctcaggtgatccacccacctctgcctcccaaagtgctgggattacaggcatgagccactgcacctggtcattagctgcacttctaaatgtatgaccctcataaggtctacttgagtgctgcttgtgttcaacatgatctctccactgtgattggaaggaattcgaataatccttggccccaggtgacctctgggagtttaatcttaaggctctcaggtaattgttctttcttcagaaatcattctctccttatgtatacaatggtgaataaagtaaaatactaataataggaaaaaaaagaggcatcattctttcctggtctcatgtggtttcaccttatgcatacatagataagtgttgagcaaagattcaagtgcaccctacacagatttctagagctctactctgtaggtctttcctctcaggtacagctttatccctggtttctctttccatggtttgagttaccctcagtcaaccaaggtctgaaaatattaagatatttggagagagagagagagaccacattcaccaacttttactacacgaattgttatcattgttctagtttattataagttattgttggctgagcacggtggctcatgcctgtaatcccaaccccttgggggccgaggcgggcagattacctgaggtcgggagttcgagaccagcctgaccaacaggaataaaccccgtctctactaaaaatacaaaattagccaggtgtagtggcaaatgcctgtaatcccagctactcgggaggctgagacaggaaaatcgcttgaacccaggaggtggagtttgcagtgagcagagatcacgccattgcactccagcctgggtaacaaaagcgaaactccatctcaaaatgataataataataagttattgttaatatcttactgggcctaattcatcaattaaattttatcataggtgtgtatgtgtaggaagagcatagtttgtataaggcttagcacttccttgatttcatgcgtccactagggatctgggaaagtattcctcttgcataaggggagactactgtatgctgcttcccaaattctgctgtatgggcttcccaaaattcaagctgtgtctcaagtcagtgaaaatcccaggctctgattagtctcttgctccttgggttgcagtctgggaattccctttaagcagtaaccctggccatggtaggactcacctcccattgtagcctcccaggtggctgtgattacaggcgtgagccactgcactcagcaggaaagcattgcattttgtacaatgctttactagtaagaagtaatcagtaagtgataaggtattgtaacctgtggtctggactcacctgaacaggttggattaagtgggttgatgcctgccatttaaccctttgtcttcgttgttatcactgaactcatacggttgccttggaaataacatagagagattgggtggtcctttgaggcccagggctctgttttttaaatgccattttggccacctgcagaatgattaggggactcactgaactcatagattgctggacaccataccagggccctgggaatgtgaaggcttcacagacttctcagtcaatgtttaagcatgtacgagcttgcaaacctttgacctacagtcatctaaagcagaaatcaattccaaatcccagggcttgggggcgagaatcagtttctcctaggtgtataagtggatatttagtaaaccaagtaaagaacaaccttatggccaggcgcggtggctcacacctgtaatcccagcactttgggaggccgaggtgggtggatcacgaggtcaggatttcaagaccagcctggccaagatggtgaaatgccatctctactaaagatacaaaaattaggccgggcgcggtggctcacgcctgtaatcccagcactttgagaggccgaggcgggtggatcacaaagtcaggagatcgagaccatcctggtgaacacggtgaaaccccgtctctactaaaaatacaaaaaattagccgggcgtggtggcaggcacctgtagtcccagctactcgggaggctgaggcaggagaatggcatgaacccaggaggcagagcttgcagtgagctgagatcacaccactgcagtccagcctgggagacagagcaagactccgtttcaaaaaaaaaaaaaagatacaaaaattagccacgatggtggcgggtgcctgtagttccagctacttgggaggctgaggcagagaattgcttgaacccgggaagtagaggttgcagtgagccaagattgcgctactgcactccagcctgggcgacagagagtactcggtcaaaaaaaaaaaaaaaatcacgactgtaatcccagcactttgggaggccgaggcgggtggatcatggggtcaggagatcgagaccatcctggctaacacagtgagaccccgtctctactgaaaatacaaaaaattagccgggtgtggtggtgggcgcctgtagtcccagttacttgggaggctgaggcaggagaatggcgtgaacccaggaggtggagcttgcagtgagccgagatcgggccactgcactccagcctgggtgacagagcgagactccgtctcaaaaaaaaaaaaaaagaacaacctttgaggttattccatatccattgaatcagctctttttatctaaatgtctatggaaagaaggctcaggaaggagaggaggttgtagaatgaagccactgaagttttccgggcaaatactgcctggctgaaaccctaccaagttattactctcttgactgtaggctgagtcatgccaggtgacttcctgaaagctgctgttgctcctgatgcttcaccgccgttgtaccatgtggcacacatcaccacatcacaaagcattttggttgctgaagtccccatagggcctaggagagctttgtggtgtccatcattatatcctcaggatctagccaagtacccatttcccagaggaatgaacaggcaccaaattctccatctactgtgatgagtttacccttcagagtctttcttctttcagcagggaccggaaccaccttaccctctctgcatctcccacctcttatgctgaacagctctcccaggtcaagcctcaggggtctgccctggtttatttactagttctgaggatcagtgtcctaataagcaacctcttaagaggatcaacccagctttcttcactgaatcttttcatgttgtctttgagggatctcacagggcgcattaatgaattcattttacacattcagttctaccttaggtactggtctgactgtctcaagtctcacattgtctatggcataaaccttaagaaaccctgcctttgtctttcacagtggtcatctccatcagaggcaactgaaagtttcttatcaaaagaaatttggttgccacccccacagttctacgaagtgagaagacttgcaaactttgcctctctctctgacttgcacaaattttgtttgggtcgtgcattagaaggactggaaaggtggctgccgatcatcttgttaactgctgatgggatggtccatcttttaccaggtaaaccagtgaagcatcggtgcttttgttagtattcacattcagtgccctgggctgcatggctgtattgcccaacgtagagacaggaattacagtctgtgttttgtaatctacagggtattagctaagtaagatcaaagcctataaaatatccatattattataaccagaaattctgcataatgtcatatacatacacatacatttatattaatatatttcctagacattgacaaaggtctttctcatataatttctcactttttttttttttttctgagacagtttccctctgtcacccaggctggagtgcagtggcacaatcttggctcactgcaacctccacctcccaggttcaagcaattctctgcctcagcctcccaagaagctgggattacaggtgcccaccactgtgcccggctaatctttgtattttttttttagtagatacggggtttcaccatcttggccaggctggtcttgaactcttgaccttgtgatccacccgccttggcctcccaaagtgctgggattacagtcatgagccaccatgcctggctgatttctcacttttttgcattttaagtttgaattacgagaactcgtaagttgtcatctaatttgaattagggagctttttttttgagacagagttttgctcttgtcacccaggctggagtgcaatctgggctcactgcaacctttgcctcctgggttcaagcgatacttctgcctcagcctcccgagtagctggaattacaggcatgtgccaccacgcctggctaatttttttgtattattagtagagacagggtttcaccatgttggccaggctggtcttgaactcctgacctcaggtgatccgcccgcctcagcctccccaaattctgggattataggcatgagccactgtgcccagccaactttgtttttttttttcagttggacataatttcaattgaaattatgaattatgaaattatgaagaaaataaagtaaaatgttaactctatctcaactgaaaatacaaaaaaaaaaaaaaaaaacaaattagccaggcatggtggcacacacctgtaatcccagctgctcaggaggctgaggcaggagaatcacttgaacccaggaggtagaggttgcagtgagccaagatcatgccactgcactctaacctgggcgacagagcgacactctctgtcaaaaacaaaacaaaacaaaaggctgggcgcggtggctcacacgtgtaatctcagcactttgggaggctgaggcgggtggatcacctaagggcgagagttcgagaccggcctgaccaacatggagaaatcccgtctctactaataatacaaaattagctgggcatgggggcgcatgcctataatcccagctacttgggaggctgaggcaggagaatcacttgaacccaggaggcagaggttgtggtgagctgagattgcgccattgcactccagcctgggcaacaagagcgaaactccatctcaaaaaaaaaaaagatttattactcaacctacagtgggaaaatttagcagttttgatggaatttctctaaattaacctgaagatgataagaacagcccactttgaaacatcaaaagtatatgaatatcaaggccaatcttaatatcagtattgaatagaataaagagagtcatgaactggtataatagttacagttcacagtggaaacataccagtcacagatgtttatgggcccaaagaaaactcttggctggggtgttgtaaggggatattaaaaacacaagaaagaggacaggcgcagtagttcacgcctgtaatcccagcactttgggaggccgaggtgggtgaatcatttgaggtcaggagtttgagaccagcctggtaaacatggcgaaacctgtctctactaacaatacaaaaattaaccaggcgtggtggcagacacctgtgatcccagttactcgggaggctgaggcatgagaattgcttgagcccaagaggtggaggttgcaatgagccgagatcgcgccactgcactctagcctgggcaacagagtgagactccatctcaaaaaacagataaaaaaacacaataaagaaattgaggtaagctcatagaattagattagttaacaactatctcagttccaaacatattaaatagatcaaaataaatactgatttaacaactatctcagttccaaacatatgaaatagataaaaatactgatttgtatttcattagtatattggagtgatttataaaataatactcgatggaattaaaattttatactttctgccatggtgaaaaataattttgtatttaaaaataaaatcagattttttcctttttcaggtgatgagctatatttagaagattcagactttttggaaaatcttatgtctactgaaaaaaagactgaggaaatcatgaaggaaggcaagcagtttcaccggatagtgacataccatcgccacctttatgatatccacgtgactgttcagccaaagtataaacacgtttatcctaagaactctgtagtaagaaaaagccatttgtagggtgcttaagcttgtttgtaaaatggcctacttgaagtcctcatgaataatgagggttgactttcatttgcttgaaacttaaggaagtttgtgcctataaaagttactgcaattcagtatttctttatttttttcgagacagagtctcaatctgtcgcccaggctggagtgcagtggcatgatataggctcactggaagctctgcctcaggggttcatgccattctcctgcctcagcctcccgagtagctgggactacaggcgcccgccaccatgcccagctaatttttttttgtatttttagtagagacgggttttcaccgtgttagccaggatggtctcaatctcttgacctcgtgatacgcccgccttggcctcccaaagtgctgggattacaggtgtgggccaccacacccagcctttttttttttttttttttttttttttgagacagagtgtctcactcttgcccagaacccaggctggagtgcagtggcccaatctcggctcactgcaacctccacctcccaggttccagcgattctcatgcctcagcctcctgagtagctgggactataggcatgcaccaccatgccccactaaattttgtatttttagtagaaacagagtttcaccatgttggccaggctggtctcgatctcctgacctcatgatctgcccgccttggcctcccaaagtgtgggattacaggcgtgagccactgtgcccagcatggtgtttcttatatcaggtgttttagggagctcgcttgcttattccattctttaatccttacagtgtgccacacgtataaagtttataacgtattaatgatctcattacccaaaaccagaacataatttcacaagggttcctacttctgtattgttttattatctcaaaaatttaaataacatgttctgctgtttattgttcttgttatccactgtattagcaccttccctgatgtgctttggaggttgatcaatgaatttctgagactttctgctggaattactttaagggtgtcttattagatgatgaaaagttggctgagacacccttcaagtgaccatgtcattgttttcttgctatgtctttagcttaatgattaagatacaattctttttaaaatcaaatggtattagttattatgtttcccaaattagaaatcgattttagttaacattttattttattttattctattttatttatttttgagacagagtctcgctctgttgcccaggctggagtacaatggcgcaatctcagctcactccaatctccgcctcccaggttcaagcgatttttctgcctcagcctcccgagtagctgggattacaggcacccactaccatgcccagctaatctttgtatttttagtagagacggggtttcaccatgttggccagtccggtctcgaacttctgacctgaggtgatctgcccaccttggcctcacaaagtgctgagattacaggcttgagccaccacgcctggcctagttagcattttaaagaaacacaaagccataacaaaaaccatcattgtttgtattccacactgttaatgaatgtaaagaggttagaaatgtagtgtttgattaatgatgtttatttttactgtatttaatatgagtaatttttcatcatctttcaagaggaataatgtttattgattaaaggtgagaaatgatagttaagacaccaattccatgtccagatctttgactgtatcatgcattgtacaattgatttcatattttatgaaatgccttaattttcctactataacataaagacaatgatgaataaagtttatgtgtatgattaaatccagattagagaactatatctagcacagcagtcctcagcctgggcacttttgccctagggaacatttggctatgtctggaaacatttttggttgttgaaactgtgggcagagtgggtgggtgggggagtatgctactaccatctagtagtagggagaggccagggatgcaactgaacagcctgcaatgcgcagtctcacccatagcaaagaattacctgaccaaggatgagacacccaatctaaagtaaaatctttttttttttaaataaatggttccaatatgtaaattttgagaaccacagatactattattctgtctgccttttgaatctacaaaaatgggaaattacgtccaattggaaaaaaaaaaaaagttggctgggctgggcgcagtggcttatgcctataatcccagcattttgggaggctgaggtgggcggatcacctgaggtcaggagttcaagaccaggctggttaatgtggtgaaaccccatctactaacaatacacaaaaattagccaggcatggtggcctgtaattccagctactcaggaggctgaggcaggagaatcgcttgaacctggaggtggaggttgcagtgagcccagattgcactccagcctgggtgacaagaggaaaactgtctcaaaaaaacaaaaacaaaaacaaagtgtacaaaaatttttgttgtcttttgatttttttgagatagagtctcactttgctgcccaggctggagtgcagtggtgcaatctcagttcactgcaaccttcacctcctgcgttcaagcaattcttgtgcctcagcctcccaagtagctgtgactataggcgcccgccaccacacccagctaatgtttatatttttagtagagacaaagtttcaccatgttggccaggttggtcttgaactcctgacctcaggtgatctgcccgcctcagcctcccaaggtgcccgggattataggcatgagccaccatgcccagcctagctttgtcttttgactctcaaagattactagaatgttgccgctggaagggacctcattgaacaccatgattttgccagtgagaaaaccgagacacgcagctggttagtgccacagtcaactccctcttcactggagttgccatggctcagtgggtgatattagaagatgtcatgataaagtaatatgaccagtttttcttcatagaaaagatcgttttcacaccacgtttccctcatgtatgcttttttttgtttttgtttgtttgtttgtttgtttgtttgttttgagatggagtctcacattgttgtccaggctggagtgcagtggcgtgcttttggctcactgcaacctctgcctcctgggttcaagcaattctcctgcctcagcctcccgagtagctgggattacaggcacgtgccactgcacctggctaatggttgtatttttagcagagacagggcttcaccgtgttggccaggctggtcttgaacttctgacctcaagtggtccatccacgtcatgctggcaatacaggtgtgagccactgcgcctggcctgtatgttgttgtttttaatctgagtgaaccttgtctccttccaagaattccttttgggagacttgtcacatgacttcctacctatagtgatatcttgcccataccccataaccccaaataatatgagctgaaaaattaagttttagaattcagattactggtgttcatggcatttatgacacacagtttttcttttcttttctttttgagacaccttctcgctttgttgcccaggctagagtgcggtggtgcgatcttggctcactgcaacctctgcctcctgggttcaagtgattctcctgcctcagcctcccaatttgctgggattacaggcatcaaccaccacacccagctaatttttgtacttttagtagagacagggtttcaccatttgaccaggctggtctccaactcctgacctcaagtgatctgcccgcctcagcctcccaaagtgctgggattacagatgtgagcccctgtgctgggtcagaaatatttttaaagttaaaaacaaaattcggctgggcatggtggctcacacttgtcatcccaacactttgggaggccaaggtggaagaatcgtttgagcccaggagttcaagacctgcctgggcaacatagggagaccatgtctctataaaaaaattcaaaattagctgggtgggccaggcacggtggttcacgcctgtaatctcagcactttgggaggctgaagtgggtggatcacaaggtcaggtgttttgagaccagcctggtcaatatggtaaaaccccgtctctactaaaaatacaaaaattagctgggtgtggtgacacatggctgtagtcccagctacttgggaggctgaggcagaagaattgcttgaacccaggaggcggaggttgcagtgagctgagatcgtgccactgcactccagcctgagtgacagagcaagactgtctcaaaaaaaaaaaaaaaaattagctgggtgtagtggtgcatccctatagttttatcttctcaggaggctgaggtgggaagatacttgagcccaggagatagaggctgcagtgagcagcgataagattgcgccactgtactccagcctgggcaacagagcgagaccctgtctcaaaaaaaaaaaaaaaaagcaccatgagacagggtgaagaaaaaggaagccttgtgaatctttaaaaaagtgttttccgctagcaccagagttggaggagggcaggttacagtacaaatgcggaccccttttaaccttggggagactgggtggctggacccccagggcagtgagtgtcttgactatgggagtgtaatatataaatatttccattttctgtgagccatgttgtaaaaagattgggaaataccgtactgtagcacaggatctagtcaaacaaaaaagtgtctccccacaccaagaactgggagaagtctatattacccatttttgtggattgggaactgttttgggacttcctatttaagatggggttttgctatgttgccaaggctgggctccaacttctggctcaagggatcctcccatctcaccctcccaagtagctgagactacaggcacatgtcactgcacctggctacaagacctcctgtttattttattttattttatatattttttgagacagagttttgctctgttgcctaggctggagtgcagtggcatgatctcagctcactgcaacctctgcctccttggttcaagcgattctcctgcctcagcctcctgtgtagctggaattacaggtgcttgtcactatgcccggctaatttttgtatatttagtagagacagggcttcaccatattagccaggctggtctcgaactcctgacgtcaagtggtccacccacctcggcctcccaaagtgctgggattacaggcctgagccacctcgcccagccaggacctcctgtttaaatcagatcctgtcattttccatctctttttggcaaggtcttgagctttcaggtgagttggccataccaggtgccttgattggaggggaggccttgtcaacctaatttcaggaacaggtgaacatcacgcactttgcagctgtgtttttctcccgactggcagctacacacctttcctctgcaaccatcctgcctgagagtttaagtgcatgttatctgtgggacctcgtgcaatccagttttcttatagaactgcatgcttatgtgagcattctgttccccaaataataactccacagtttccatgctctctccaaactcttgcagtcttttgtcatcttgttggttcccttactagcaaattaactcgtttagactcggagagccctgccagttgaagtccagctgggaagaaatccaggaccaggaacctttccaaaaggtgcagatcaaatggaaatgttgccaggaggccacgaagacccagggattcatgactgtccaggactcttcctcaccaccaaggcttccagctcacagcgtttaaggggtgtaggctggcctagagaaagcaggaggacaggggccccttagcaggcaacaaggaccaactgagggcctggtgtggtggttcatgcctgtaatcctagctgctcagggggctgaggcggaaggatggcttgagcccaggagttcaacaccagcctgggcaacacagcgagacccccatctctacaaaaaaattaaaaaattatccaggcgtggtggtgcatgcctgtagtcccagctacttgagaggctgaagatggaggatcaactgagcccaggaattcaaggctgcagtgagccatgattgtgccactgcactccagcttgggcaagagagccatatcctgtctctttaaaaataaaataatgaacttgtaaccacctaatgggttcaccttgcccgctgcctagacagagccaatttatcaagacagggaattgcaatggagaaagagtaattcacgcagagccggctgtgtgggagactggagttttattattactcaaatcagtctctccgagcatttgaggaacagagtttttaaagacaattgggcgggtaggagcttgggaagtggggagtgctgattggccaggttgaagatggaatcagaggttgttggagtttttcttgctatttactcttcctggttggtttggcagaactggttgaggcagattatcggtgtgggtggtgtcagctgatccactgagctgattcaaggattgttgtctcatgcctccctaaaatgtaaaagaccaagtgaggcaggaaaatagggtctggaggtagggaacataaggccgattcacgcttcagctataaggggaaataccctctccatagggcatacaccgagtaaatgacttcgtaactttacttcaccgtcttcatttacatcgggcgtaccccaagcagaaggtatttaaattcacagaaattctgccgggcctttgagtccctgtgttcaggcctgctcccacactgtggagtgtactttttcaataaaacccttcattccttccttgctttgtgtgtgccttttgtcaaattctttcttcaagacaccaagaacctggacaccctccaactttaacacaagctgtgcctcgaccacgtctagcaaatgtcgttaggacttcctgtgtcaggggcgcctgtcctcaaccttggcaaaattttttgttttgttttgttttttgagacagagtctcactctgtcgcccaggctggggtgcagtggcctgatctcagctcactgaaacctctgcctcccgggttcaagcgattctcctgtctcagcctcccaagtagctgggattagaggcgctccccaccatgccaggctaatttttctatttttagtagagacggggtttcaccatgtcgaggatgctagtctccaactcctaaccttatcaggtgatccgcacccctcgcctcccaaagcgctgggattacaggcctgagccacctcgctctgctggccaaataaactttctaaatgaactgagacctatctcacattttcaggattcacaggctcttatcaattttgtttcagagtcaaaccatggactgaattccttcccaaggttagttgggcttccgcccaggaataaacaaggacagcttaaaggttagaggcaagatggagttgattaggtctgatttctttcaccatcacaatttcctcagttacaattttgcaaaggtggtttccaacggactcagccgcacgcggcccctctgtccctccgggggacaggcgagtgtccctggggcctgcagggcagtcctgctggctgcaaaagagagaatcacgcgacccctagccgggcctcccagggcctccgcgcgtcagtcctcctggccaccgcgtggcgctgtgccttacgttgttgggccgttgggtggaccacgtggtctccgacgcctcaaggcctgctcagcgtgcgcgggcatccggtgggtgcgggaggcccgaggccaggcaggcagggatcccgcagcgaggggctggttactgccaggacggagcgcattgcctcgagccgaccccggggtccgcgagggctcctggggacgaggagtgtggggcacctgccgcggggggcccaggcgctaaaggtggagggaaggaacgcactcgcggcgggggcctggccggggcggacgcagccagcctcacccgcgacggtaggggacttccagggcgagggggcccatctgccctcgggcgccaggaggatgctccagctcctggtgctgaaggtgagcgccgccaagccagacccacgccagacccacgcagtcccccacccccaccccagccgcgcacagcctcccacccccaccccagctccgcacagcttcctacacccaccgcagccccgcacagcctcccacccccgaccccaaccctacacagcccccacccctccccccatcccagcctccacatccctccacacccactcctcccagcccacgcatcccccccatgtccactccctctcagcccacacctactccccacgcccactcctcccccaacccacacatcctcccacacccactcccacccagctccacccccacactcacacatgcccccaccccatctcactgctgcacactccatcccactcccacacatcccaaccccgtatatcccatgccgccacaccacgcccccactcccaccccactcccaccccaacccatcccactcccaaccccacacacccccaactcctaccctagccccagctcccacccgtttccttatcgctgcccaccccacagtcacaccctcgcccctgtccccaccccatccttattcccaccgcccccactcacacctccaccccaacatttcatccccccacactcagccccacacaccccaccaccaccccatctccactcccacctgcaccccagccgcagcccaccccacctccactccaaccccaccccgccctcccccacctgaaccctccctgcgcccccaccagggggcaccccgggctgggagctggggtagaacccggatgagcccgggtttcacgggccctggcgtgctccgggatgcacctggaggagcgcggaattggttgctcctccgaatgctcgatcacccgggccaagcgacactggcgtccccagggccccgctctccgtactccacggggcccttaggctcggcgcctggacagggtcgggtggcccgggcagccccagcccatgggtccgggcttccctcatgcccccagtctctgttgccctatccgctcaccgcgtgggctctgcgtgggcgttgttctagtcctcggggaagggacgcccgcctggacccttgcttttcccccttggagtccagtgagggctcattggtgaaggggaaagcgttgctggaggaaggagttgacaggccagagcagaggggtgggtatgggttattggagaaaggaaatctaaatactttgaaaatcacacttcagtgggcccaggagctggacgtagcagattgtgggattgttttattttattttattatttattcatttatttttttgagatggagtttcgctcttgttgtctaggctggagtgcagtggtgtgacctcagctcactgcaacctccgcttcccgggttcaagtgattctcctgcctcagcctcccgagtagctgggattacaggtgcctgccaccacacctggctaatttttgtatttttagtagagacagggtttcaccacgtggctgttctcgaactcctgacctcaggtgatccacctgcctccgcctcccaaagtgctgggattacaggcgtgagccaccgtgcctggcctattttattttattttattttattttattttattttattttattttgagaaggagtcttgctcagtcacccaggctggagtgcagtggcgcgatctcagctcgctgcaagctccgcctcccgggttcacgccattctcctgcctcagcctcccaagtagctgggactacaggcggccaccaccacgcctggctaatttttttttttttttgtatttttagtagagacggggtttcaccatgttagccaggatggtctccatttcctgacctcgtgatccacccgcctcggcttcccaaagtgctgggattacaggcgtgagccaccacgcccggccggtgcgatttttaaaaccagcactctcctgctcttacttgatgtcttgtgtaatctctctgaacaaagattcacaaatgtttgaggaagctgactcttacagagaatttgccctcagacttttaggtgttcagatccaccaggcgagctcctctcctccagtcagatgttgtctgtcagtcctaacgatgctagtccgatttcttctttagaagagacagggctcttccagggctacacatcctgaaacatgcacaaccatcccggcagaactttgatagcaggagctggacttgctgcctcctgttcgcgaacccctttcctctcagttgggcccaggaactctttcatttacctgctcaactctgatctgcccccacttctggccctcaaccagctcaccccctgagcaaattctgtcctgaataggagtgtctccccaagtgctgtgtaggtaccacctgtcctgcagatgaagttagcttttacaaggatgaaatatttttccctccatgtatccatcaacagatgactgggtaaacggaaggtggtttgtacatacacaatggcatattatttagccttaaatatctgagaaatctttgtctgactcacagtcacaaagatttttttcccccatgtatccttttattatttaaaaaaaattttttttttttttttttgagacggcgtctcgctctgttgcccaggctggagtgtggtggagcaatctcggctcactgcaacctccgcctcccgagttcaagcgattctcctgcctcagcctcctgagtagctgggattacaggcgcgtgccaccacagccggctaatttttatatttttggtagagacggggtttcagcatcttgtccaggctggtctgcaactcctgacctcaagtgatctgccctcctcggcctcccaaactgctgggattacaggcaagaactgctgcacctggcccccccatgtaaccttttagaagttttataattttatattttacatttagatatatgatccgagttaatttttgtatatggtgcaaggaatggatgaagtttcatttctttgcacgtgattatctaactgttccaacatcatttgttgaaatgactatccgtcctcctttgtgtcttatcaaaaatcaattgactatatgtgtgattatattcctgttatattgatttatgcacaataccacactgtcttattactgtagctttataggtaactattttgttttttttttgagacggagtcttgctctgtcccccaggctggagtgcagtggtgtgatctcggcacagtgcaagctctgcctcccgggttcatgccattctcctgcctcagcctcccaagtagctgggactacaggtgcccgccaccatgcccggctaatttttttatttttagtagagacagggtttcactgtgttagccaggatggtctcgatctcctgacctcgtggtccacccatctcggcctcccaaagtgctgggattacaagcatgagccaccgtgcctggccctttatagataactcttgaagtcaggtgatatgagtcttccaactatattctttttcagaattgttctagttccttagcttttgtaatatgcattttgtaattgcttgctgagtctaccaaaaaaaaaaaaaaaaccatgctggaatggagttgtatttatagatgggttcagagaaatatatattaatacagtatatctatacttatttagatctttcatttctttccgtcagtgttttataactttcagcataggaattttgcacatatttttaagatttagacctttaagtaattactgggttttgttttgtttttcagtaaaagacacagggtcttgctttgttggccaggctggagcgcagtgctgtaatcacaacttactgcaacctcaaactcctgggctcaagggagcctcctgccccagcctcctgagtagctgggcctaaaggcatttgcccccactcctggttaattaaaaaaaatttttttagagacagggtctcactgtgttgcccaggctggtttctcaaactcctgggctcaagcaatcgtcccacctcagcctcccaaagtaatgggattatgggaatgagccaccactcccagcctttttgtaattttaaatttccaatttccatttctggaatatagtaatacgattgaattattattttttaatttaattttaagttccaggatacaagtgcaggacctgcaggtttgttacatagatagacatgtgccatgttggtttgctgcaactattaacccatcatctagttattaagccccgcatgtattagtttttttatcctgatactctccctcccctctgtcccataggccccagtgtgtggttcccctccctgtgtccatgtgttctcattgttcagctcctgtttataagtgagaacatacggtgtttggttttctgttccagtgttagtttgctgaggataatggcttccagcttcatccatgtccctgcaaaggatattatcttgttactttttatggttacctagtattccatggtgtatatgtaccaaattttctttatccagtctatcactgatgggcatttgggttgattccatgtctttgctattgtgactagtgctacagtgaacatacgcatgtatgtctttataacagaatgattgatattccttttggtatatacccagtaatgggattgctgggtttttctggttctagatctttgaggaatcaccacactgtcttccacaatggttgaattaatttatactcccaccaacagtataaaagcattcccatttctccacagccttgccagccatctgttgtttcttgactttttaataattgccattctgactggcatgagatggtatctcattgtggttttgatttgcatttctctaatgatcagtgatgttgagctttttttcatatgtttgttggctgcataaatgtcttcttttgagaagtgtctgttcatgcgctttgcctactttttgatggggtttttttcttgtaaatttgtttcagttccttacagattctggatattagatctttgtcagatggaaagattgcaaaaattttctcccattctgtaggttttctgttaactctgatgatagtttcttctgctgtgcagaagctctttagtttaattcaatcccatttgtcaatttttacttttgttgcaattgcttttgatgtttttgtcatgaaatcgttgccgttgcctatgtgttgaatggtattgcctagatttttttctagggttttttttttatagttttaggttttacatttaagtctttaatctatattgagttaatttttgtataaggtgtaaggaaagggtccagtttcagttttctgcatacggctagccagttttcccagcaccatttattaaatagggcatcctttccccattgcctgtttttgtcaggtttgtcaaaaatcagatggttgtagatgtgtggtcttatttctgagatctctattctgttacattggtctatgtgtctgtttttgtaccagtaccatgctgttttggttactgtagccttgtagtatagtttgaagttgggtagcatgatgcctccagctttattctttttgcttaggagtgtcgtggctatatggactcttttttggttccctatcaattttaaagtagttttttctatttctgtgaagaatgtcaatggtagtttaatggaaatagcattgaatctataaattactttggacagtacggccattttcacgatgctcttcctatccgcgagcatggaatgtttttccatttgtttgtgtcctcttttatttcctttgttagttgtattcctaggtattctctttgtagcaacaattgaattatttcaataatcttgtgccttgtagccttgtaaagtcaattattagttctggcatatattatatattttttattgtaaaaaacatgtaacgaagtttgccatctcaaccatttttaagtgtacagttcatggtattaaatacattcataatttttttttttttttgagacggagtcttgctctgtcgcccaggccggaatgcagtggtgcgatctcagctcactgcaagctctgcctcctgggttcacgccattctcctgcctcagcctcccaagtagctgggactacaggctcccaccaccacgcctggctaattttttgtatttttagtagagactgggtttcactgtgttagccacgatggtcttgatctcctgaccttggatccacccgcctcagcctcccaaagtgctgggattacaggcgtgaaccaccacacccagtcaaatacattcataatgttgtgcaaccatcaccaatgtccctctccagaagtctttttccttttgcaaaactgaaactctgctttctctatgaatttgactactctgagtgcctcatataagtggaatcatacagtttatccttttgtgactggcttatttcactcagtataatgtcctcagggttcattatgttgtaccatgtgtcagaatttcctttcttttgaagcccagtgcagtgatgtgaacgtgaggacccaactacttgggaggctgaggtgggaggattgcttgaggtgaggattgcttgaggtgaggattgcttgaggtgaggtgggcaatatagcaagaccctgtctcttaaaaaaacaaatatatgtctttttttaaaaaaagaatttccttccttgttcagactgaataatagtccattctgtaccacattttgcttatccatttatctgttgagggacactgggttgcttccacattttagctattgtgaataatgctgctatgaacacaggtgtgtacgtatctcttcaagatctttcaattctcgtggatctacacccaatagtggaattgctgcattatatggtaattatagttttaattttttgaggagccaccctaccattttccacagcagctatgccgttttacattcataccaacagtgcacaatgattccagtgtctccacagccttgccaacacattattttctgttttaacacaccttccagcacactgaattttcaggttttttttgacagtagttatcctcatgagtgtcaggtagtatctcactatggttatgatttatatttctctaatgattagtatgttgagcgccttttcatgtacttattggccatttgtatatcttctttggagaaatgtctattcaaatcctttgcccattttttaattggtggtttgggtttttgtattgttttaggagttctctgtatattctgggtattaatcccttatgagatataagccttgcaaatattttcccccattccataagttgactttctactgtggtgatagtgacttttgatgcacacagtttttaaatttcaatgaagcccagtttgtctattttttcttttgttgcctgtggctttggtgtcatatccaagaaatttttgtcaaatccaacgtcacaaagcatttgctctgtgttttcttttgtagttttaggccttccatttaggtctttgatccattttgagtatggtgtcacataaaggtccaaatttattctttcatttttatttttatttttattttctttttgagacagagtctcactctgttacccaggccggagtgcagtggtgcaatttcggctcactgcaacctccacctcccaggttcaagtgattctcttggcgtagcctcctgagtagctgggattacgggcatgtaccaccacacccggctaattttgtatttttagtagagacgggatttcaccatgttggccaggcttgtgtcgaactcctgacctcaggtgatctgcctgctttggccttccgaagtgctgggattacaggtgtgagccattttgtctggcctccaagttcattcttttgcatgtgaatatccagttttcccagtgctcatttgttacaaaacctttccctgaatggttttggtacccttgtcaaaaatcatttgactagaccacaagggtttattctggactctctattctactctgttggtctatatgtctgtctttatttcagtaccatactgttttgattactgtagctttgtagtaaagttttgtgatcaagtgtgagtcctccagctttgttcttttttgatattgttttggctattttgggtcccttgggatttcatgtgaattttagaatgtgcttttctatttctgaaaaaatatcattgtggattttggtagggattgaattgaatgtgtagattgctttgagtaggattgacatcttaatgatattaaatcttccagtcaatgaatgtgggatgtctttccatttatttatgtcttctttaatttctttcagcagcgttttataattttcattgtagttctaattttttaatagactccttaaggttctctgtgtagacaattgtgttctttatgaataaagacaattttatttattcctttctaatcttcctgacagtctttttcctgtcttactgtactaactgggacctttagtacaatgttagcgagtataccccttgtgaaatttttcttttcctttttttttttttttttgtgacagagtctcactcttgttgcccaagctggagtgcagtggcgcgatcttggttcactgcaagctccgcctcctgggttcactccattcttctgcctcagccccctgagtagctgggactacaggtgcccaccaccacacctggctattttttttttttttttttgtacagatggggtttcaccatgttagccaggatggtttcgatctcctaaccttgtgatccgcccgtctcggcctcccaaagtgctgggattacaggcataagccaccgtgcctggcctaaatttttatttttcatttatgaaatttacgttttccacagcttgtgtgtgtgtatctatatctatacatgtataaatagatacatatctatatacatatagagtttccatttcttaagtgagattcttttgttttcaactcactctaaccatctcatctttaagttctgtatttataatagctgtttttaagtcctcgcctgttaattccaatatctgggtatcttgggttcactttctggtgactgctttttctttttcttttttttttttgttttttttttttgtgagatggagtcttgctctgtcgcccaggctggagtgcagtggcgcaatctcggctcactgcaagctccaccacccggtttcacaccattctcctgcctcagcctcccgagtagctgggactacgggtatctgccaccacgcccagctaattttttgtatttttagtagagacggagtttcatcgtgttagctaggatggtctcgatctcctgacctcgtgatccgcccgtctcggcctcccaaagtgctgggattacaggcatgagccaccgtgcctggcctaaatttttatttttcatttatgaaatttacgttttccacagcttgtgtgtgtgtatctatatctatacatgtataaatagatacatatctatatacatatagagtttccatttcttaagtgagattcttttgttttcaactcactctaaccatctcatctttaagttctgtatttataatagctgtttttaagtcctcgcctgttaattccaatatctgggtatcttgggttcactttctggtgactactttttctttttcttttttttttttttttttttttttttttgtgagatggagtcttgctctgtcgcccaggctggagtgcagtggcgcaatctcggctcactgcaagctccaccacccggtttcacaccattctcctgcctcagcctcccgagtagctgggactacaggtatctgccaccacgcccagctaattttttgtatttttagtagagacggagtttcatcgtgttagctaggatggtctcgatctcctgacctcgtgatccgcccacctcggcctcccaaagtgctgggattacaggtgtgagccacagcacccggctaaaactgcgtatttctttcagccttcccaccattggtcttctctggactccttggggtctcatttctgccaagaatgtgacaggtgttcttatgcagactttagggctccccctctgtggctctccgtttaggaattttaccctttaattctcaagctgctatggcagccccaaactctgttctctgattcctcaagccacaaacatgactttctccttgaattgcagctggttaacaccacgtggactggggaatgggctcaggggaaaagccgtgtaaaagtggatctcacccagggaagtttccttctttcaagggttgaatctccttcaggttctgcttgcttttggtagctcttcactgccttcaaatagtcatttttgtattttttccagggtttattattgttacccacaggtgatatagaaactattctattgtcactggaaccagaataactactgttcttttttctgatcatttgttataaaaatgttcaaaccttcagaaaagtagaaataatactagtgggaatacctgtattcttgccaccttgggcaaagatgtcatttttgcccaaatcttgagatgtcattttttctaggcagagttaggtaatacttttgaaaaatcatgagttcttggctgggcgcggtggctcacgcctgtaatcccagcactttgggaggctgagatgggcgaatcacctgaagtcaggagttcaagaccagcctggccaacatgatgaaatcctgtctctactaaaaatacaaaattaactgagcattgtggcgcacgcttgtaatcccggctactcaggagacttaggcaggagaattgcttgaacccaggaggtggaggttgcagtgagctgagattgcgccactgcactccaacctgggtgacacagcgagaccttttggtattttcaatccaaatttaacttttcactttatatttgtgtctttaacaatgaaaatcttggcttctaataacaatagtacataacaaaatacattccaggaagtctgactttcttccgtgtcccttctccatttctctcctccccttagaccatgatttgcatttactttggtttatctgccattattattttttttattatgagcagaatgtacttatattcacattgctttctctttcttacaaaagaagaatacaaatcaggcacagtggcttatgtctgtaatcctagcacttagggaggccgaagtgggaaaattgctcgagccccggagtttgagactagcctgggcaaaatagcgagacaccatctctattttttttttaattaaaaaaattttttttaacaaacaaaagtactaaaaacattgctctgaaccttgtgtttgtatattactatggatttttcagaatatgggagattgaggacatccgttcgttatttgagtcacaacacataattgagaattacatactgttggttatgtgttttagaattttatcttcggtctaaccatttaagcaaaggcatttgtcaagaatttgttaggtcacttaaattagaaacagtaatcgtggctctaaagtttattttgtggtactacttttaaatcatacgctgttctgtttgtcttttaaaaaatttacagattgaagatccaggttgcttctgggttattataaaagggtgtagtccctttttagatcatgatgtcgattatcaaaaattaaatagtgccatgaatgacttctacaacagcacgtgtcaagatatagaaataaaacccttaacattggaagaaggacaggtatgtatctaaatgttctttaatcactgtgtattgaaacaccactcaaaatataaactattttggcaacgatgatgattcaagcttttagagtattttagtttcttacactcagtgccttgtgttaggtttttttttgagatggagtctcgctctgtcacataggctggagtacagtggcaccatctgggctcaccgcaacctccgtgtctcgggttcaagcacttcttctgtctcagcctcctgagtagctggaattacaggcatgggccaccacactcagctaatttttgtatttttagtagagacgggggtttcaccgtgttggccaggctggtctcgaactccagacctcaggtgatccacccgcctcagattcccaaagtgctgggattacaggtgtgagccactgtgcccagccagtgtaaggttctttaggttgcacaagattcaggctagtcatggaagggggtggccgccatgtaaggtccatgtggggcaaaagtagacagaatgtcatctacacccaggcattagggccatccctctggggctgggaaccagggggttatttgagatcccacagaggtgtagggatctcagcaaagagggaatagggtcttcagtgtagggccaacgcctcccttttggttgcatgactttggccaactcagatgtctttgttctccttactccacgccgtggcccctccttgccttcttgcagactcagctctcactgccccttgtcatggttgccacagctcagctacttttcagaagagagtgaatttttgtaatggtataataggaaaaggtttataaactctttatgagaaaaagcagaaataatttgaatccacttcccccaaatcatcattaataacataatttattttagtatatgtgctgccgaagcaagcacaataacataatttgtttccacgccattgactaattgaagaagttaaaccaggtcaattgtttttaaaaatattccacattttgggttgggcatgctggctcttgcctgtaatcccagcactttgggaggccaaggaaagaagattgcttgagcctaggagttttgtgaacagcctgggcaacatagtaagaccctgtctctacaaaagataaaaagattagtgggcatggtagcacgtgcctgtggccccagctactctggaggctaaggcagaagatcacttgagcctgggaggtaatagctgcagtaagctgtgtttgcgccactgcactctagcctgggcgagacagcgagactgtctcttaaaaaaaatatgcgtagccgggcgtggtggcccacgcctgtaatcccagcactttgggagtctgaggcaggtggatcacctgaggtcaggagttcgagaccagcctggccaacatagtgaaaccccatctctactaaaaatacaaaaaattagctgggcgtggtggcaggcacctgtaatcccagctactagagaggctgaggcaagagaatcacttgaacctgggaggcggaggcttcagtgagccgagatcacgccattgcactccagcctaggcaacaagagtgaaactctgtctcaaaaaaaaaaaaaatgtatatgtgtgtgtgtatgtgtatagttaaatataaagctttgggtagatttaaggttgcttctgtttttcaagaataggtgtactgtgaacttcatgtgaacttcatgttgaattgagagatgatgttttcagtgatgctgagattgaccagaggggacatcctgaccctccttgtggccttacctgtcagcattcatgtgatggcttctccattcagtgaccactgctgcctgaatcagctcttttattcaggcactcgatgtggggttttctctcattccttctgcattcatcagctggaattcttctgttatagaactttccctgatctcttaagactgtttgattaccctgaaataacactgttccttttttaaatttttttaatttatttttttaattaattaattttttttttttttgagacagagtcttgttctgttgcccaggctagagtacagtggcgccatctctgctcactggaagccccacctcccgggttcacgccgttctcccgccttagcctcccgagtagctgggactacaggcacctgccaccatgcccggctaatttcgtttttgtatttttagtagagatgggatttcaccctggtagccaggatggtcttgatctcctgacttcatgatccacccgtctcagcctcccaaagtgctgggattacaggcgtgagccaccgcgcctggcctttttaaaaattttttaaatcagaaggcctatgaatgcaaataatacagttcatactgcaaagaaagagaaattgtgtggatcagttttcaacttagtgctttgtgcctagttatcacatttttggtgtcgagagggtggttttgtttttctctcctcctcctccttttcttttcttttcttttttttttttgaagatgggggtctcactctgtcacccaggctggagtgcagtgactctatctcggctcactgcaacctccgccttttggtatcgagcaatcctcccacctcagcctcccaagtggctaggactaaaggcatgcaccaccacacctggctaatttttttgtattttttgtggtgacagggtttcgccatgttgcccaggctggtcacgaactcctgggctcaagagatctgcccgccttggcctcccaaaacgctgggattacaggcatgaatcactgcgcctggccctttacacttttaagtacaaacagacctcattttattgtgaattcgcagtaactatgtttttttacaaattgaaggtttatggcaacccttcatggagcaagactataggcaccatttttcccacagcaggtcctcacttcatgtctctgtgtcacatcttggtaattctcccagtgtttcgaacttttttgttattattctatctgttatagtgatctgtggccagtgatctttgaggttagtattttaattgttttggggtgccacgaattgcacccatgtaagatagtgaattttatcaataaatgtgtgttctgactgctccaccatctctctccctctccccaggccttcctgttcactgacacacaattgaaattaggccaattaataaccctacaatggcccctaagtgttcaagtgaaaggatgaatcacattaaattaaaagctagaaatgattgaacttagaggaagacattttgaaagctgagataggctgaaagctaggcctcttgcaccaaacagttagcaaagttgtgaatgcaaaggaaaagttcttgaaggaaattaaaagtgccactctggagaacacacaaatgaaaaaaaaaatgaaaaaagaagcagccttattggtaatatggagaaagttttattggtcaggatagaggcttagaaccagttactacattcccttcagccaaagcctgatccagagcaaggccctaactctcttcaattgtataaaggctgagcaaggttaggaagctgcagggaaaaaatgtgaagctagcggaggttggttcatgaggtttaagaaaagaggccatctccacaacataaagtgcaaggtgaagcacaagggctgatggagaggctgcagcagtttctccagatgtagctatgatcattgttgaaagtggacacactaaataagaggttttcaatgtatacaagacagccttctattggagaagatgtcttctaggacttccagagctaaataggagaagtcagccaggtgtggtggctcacacctgtaatcccagcactctgggaggctgaggtgggtggatcacctaaggtcaggagttcgagaccagcctggccaacatggtgaaaccctgtctctactaaaaatacaaaaattagccaggtgtggtggcggacacctgtaatcccagctactggggaggctgaggcaggagaattgcttgaacccgggaggtggaggctgcagtgagctgagatggcaccactgcactccagcctgggtgacagagagagactccatcttaaaaaataaataggagaagtcggtgtctttaaaggactaaagctttaaaggtcagagtggctttctttttaggggctaatgcagctggtgacttttaagttgaagccagtactcatttaccattccaaaagtcctgtgacccttaaagattatgctagctctactctatctgctctacgaatggaacaagaaagcctgaatgacagcacatctgttcacgcatggcttactgaatattttaagcttactgttgagatctatgctcagaaaaaaagattcctttcaaaatattactgctgagctgggtatggtggcacgtgtccacagtcccagctacttgggaggctgaagcaggaagatcacttgggcccaggagtttgagtccagcctaggcaatgtagtgatgagaccctgtctctaaaacaaaaaacaacaaacaattagtgctcattgacagtgcacctggtcactgaagagctctcatggagatatatgagatgaatgtggctttcatgcctcattttgaaggttggctggctgtgtgaattattaactattcatggtatttctacaagatgctttgacttcagcattaaatagaaatacccttcatcctttgtcaggatttctgttgaattattcgagttttgagttatgtgaggttctctagaacctgtgccttgcagtatggctgtactgtattttccaacttattcccaaggacagcaatctctatcagtccccttcctttctgtctgagcgcagctctcctgctggactgctttataaacctgtggttagcatacggtttattagttgagttggctgtggcctggcagtcctgtggtacagtcaggatgccaagggttgtcacctctgcagggtggttctccttaaaaggggctgcaggcatttacagatgcttcttaacttacgatgaggttatgtcctgataattgtaggtaaaaaatgggcttagtacacctaacctgctgaccagcctagcttaccctagcctacttaaatttgctcaggacacttaacattagcttatggttgggcaagatcacctaatacaaagcctattttgtagtaaagtttaaatatttatgtattttattgaatactgcacattatgtaaaaattgcaatagtttcacaccatcataatgttgaaaattgtaagttaaaccatcataagtcagggactgtgcacttattcagccatcaaacaggcagtttattgattgattgagacaaactctcattctgtcgcccaggctggagtgtagtggcgcgatctttggctcactgcaacctctgcctccctggctcaagtgatcctcctgcctcagcctcctgagtagctgggactacaggcacatgccaccatccctggctgatttttgtgtttttagtagagacggggtttttccatgttggtcaggctgctcttgaactcctgagctcaggtgatccactcacctcgacctcccaaagtgctgggaccacaggcgtgaaccaccatgcctggcccaggtagtttatttttaaaacattttattactgttatttttttgagacagggtctcactgtgtcacccaggctggagtgcagtggtgcaatcatagcccactgcagcctccaattcctgggttcaagcgatcctcccacctcagcctcctaagtaggtgagactacaggcacgtaccaccatgcctggttcaagtagtttttgaagacttagtatatgccaggcactgctaggtgctgggaatttggcagtaaacaaaacagacaaaaatccatgtcatcaaggagccagcgtccagttatgacagatagtaaacaaatgtcagaggccaataagagtcatggggaggctgggtgcggtggctcacgcctgtaatcccagcagtttgggaggccgaggcgggtggatcacctgaggtcaggagttcgaggccatcctgaccaatatgatgaaatcctgtctctactaaaaaaatttcttaaaattatctgggcctggtggcatgcgcctgtaatcccagctacttgggaggctgagacaggagaatcgcttgagcccgggaggtggaggttgcagtgagccaaggtcgcaccatcgcactccagcctgggcaacaagagcaaaactccgtctcaaaaaaaataaagagtcatgggtaagggagtggaaggatgagcctggtggcagcttcctgttggtcagacacatgattgacaatcattcctaagcattatttcctgatttaagaaggtaaatgaatgcatttttcttattttactttctaaaaattgtcctcagttaaggagtggaaacaattgtagtaagaaaaacagtgacctagtactcagacggcctgtgttcctgaggttttcttatgggcagagtggctcagcttgggtaggcccggcctcctggcatctctttcctctgctgtaaaggagaatgttgactgggatggttttgagagtaccttttacctctcttgttctttgatgaaatgttaacactgaccttaaaaaacctttctgttggccaggcgtgatggctcacgcctgtaatcccagcactttgggaggctgaggcgggcggatcatgaggtaaggagtttgagaccagcttatccaacatggtgaaaccccatctctactaaaatacaaaaattagccaggcatggcggcaggcacctgtaatcccagctacttgggaggctgaggcaggagaattgcttgaacctgggaggtggagattgcagtgagctgagattgtgccactgcactccagcctgggcaatggagtaacactctgtctcaaaaaaataaataaataaaaataactctctgtttattttgcaggtgtgtgtggtctattgtgaggagctaaagtgctggtgcagggccattgtcaaatcaattacgtcttccgcagaccagtacctggcagaatgtttccttgtggactttgccaagaacattccagtcaaatctaaaaagtatgtacatgtttatctcaccttacgctcttttcagagacaaatgtcagtttcaaaggagaacgtccattttaaagtacggggctagaggtcactacactgagaaaagacaaaactggagttctttagcttccagaaggggtgctttctgggtttcaggtctgcacccactgactggcagagtgggtgggcaggatgaaggctgaggtggctctggccctctcccactgtccgtcctggcaggacaggcaggttcagatggtgttctttgcatctcctggctgctctctgcatctcctggctactctctgcatctcatggctactctctgcatctcctggctactctgcatctcctgggttctctatcacctggctgctctctgcatctcctggctgctctctgcatctcctggggttctctctctatcacctggctactttctgcatctcctggctgctctctgcatctcctggggttcttcctgcatctcctggggctctttctgcatctcctggctgctctctgcatctcctggggctctctttgcatctcctggggctctctttgcatctcctggctgctgtctgcatctcctggctgctgtctgcatctcctgggtgctgtctgcatctcctgggtgctctctgcatctcctggtgctctctctgcatctcctgctgctctctgcatctcctgggtactctctgcatctcctgggtactctctgcatctcctgggtgctgtctgcatctcctgggtgctctctgcatctcctggtgctctctctgcatctcctgggtgctctctgcatctcctgggtgctctctgcatctcctgggcactctctgcatctcctggtgtgctctctgcatctcctggtgcgctgtctgcatctcctgggtgctgtctgcatctcctgggtactctctgcatctcctgggtgctctctgcatctcctaggtactctatgcatctcctgggtgctgtctgcatctcctgggtgctctctgcatctcctgggtactctctgcatctcctgggcactctctgcatctcctggtgctctctctgcatctcctgggtgctctctgcatctcctgggcactctctgcatctcctgggtactctctgcatctcctgggtgctctctgcatctcctgggtactctctgcatctcctgggtgctgtctgcatctcctgggtgctctctgcatctcctgggtactctctgcatctcctgggcactctctgcatctcctggtgctctctctgcatctcctgggcgctctctgcatctcctgggcactctctgcatctcctgggtactctctgcatctcctgggtgctctctgcatctcctgggtgctgtctgcatctcctgggtgctgtctgcatctcctgggtactctctgcatctcctgggtgctctctgcatctcctgggtactctctgcatctcctgggtactctgcatctcctgggtgctctctgcatctcctgtgttctctgcatctcctgcgttctctgcatttcctggctgctctctgcatctcctggggttctctctgcatctcctgcgttctctgcatcttctgactgctctctgcctcttctgggtgctccttgccggctgctctcctgcctgtcctcagtttccttgtgccctttagggaggcttggctgcaagaaagacacttccaggaggtagagagaaacgcctctctccacagaaggggggttgctggcatagtctcagggtgcacagagcagagcttgtactcatgtaggtatccctggttgtcctgcttaaatgagggagggtgtgaccatcaatgaggttgggagatggctcagaatgagctgttgccaagatggtgctgtgcagtcttcactgcttctgggaccacacgtgattgtgttcgttagaatacaccagcaacaagtcagtcttggtgttttgtgatgacttttccatagtttcccgtcccagggtaagaggatgtcagtttaataaatatgaggattctgatttcactgaagaaagagcaataccaaatagacttgattgtgataagaggtgtctattttgttttgttttgtttttttgagacagtgtctcactctgtctcccaggctggaatgcagtggcgtgatcttggctcactgcaatctctgcctcccagttcaagcgattctcctgcctcagtctcccgagtagttgggactacaggcgtgtgccaccacgtccagctaatttttgtatttttagtagagacagggttttgccatgttggccaggctggtcttgaactcttgacctcaggtgatccacccgcctcggcttcccaaagtgctgggattacaggcgtgagccactgcgccagccaagaggtgtctattgaatagaagaatttcatggcatacgtgtttatcagacattgggaatttgcagtacttactgtaagagtaggtgccattcgagcttgtgatcctgcattgcatacaaccgtaatcgctgcaaaaacaattattgtgtttaactgtttggggagcttttgtttttgcgtttgatgttttacatttagtttgttttgggtgagaaaatcgtatgattaaatagagcttcaggagacttcagggggccatgggtgcagccacctttccctaacctgtctgagacagaagatggccaggctgcccagacaaggcataataggaaccctggaaagaaagccagttcatgtggaaatagtacgtggaagtggtttttcggccaggggtggtggctcacgcctgtaatcccagcactttggaaggccaaggcaggaggatcgcttgaggccaggagttcaagaccagcctgggtagcatagtgagacctggaccctacaaagaaaaaaatgtaaaaataaagtgctctgtcgtttgccaaagaagaatggaaattaaattgccaaacttattatttaaaaatctcagtcctgcagctcttttgtgcaaagttggcaaatactaattattaaaccatctgttcatttacagaaacttttaaggtaattttggtcatatattgagattgatatttagaaaatcttgaatagaatttgctttacaggtatgttcattagtatccagtatttgtccacctaaggagccttattagacttttttttttttttgagacagagttttgctcttgttgcccaagctggagtgcagtggcacaatttcagctcactgcaacctctgcctcccaggttcaagcaattctcctgcctcagcctcctgagtagctgggattataggagtgcaccaccacgcccacctaattttttgtagttttagtataagagacagggtttcaccatgttggccaggctgatcttgaattcctgacctcaggtgatctgcctaactcggccttccaaagtgctgggattacaggtgtgaaccaccacacctggccaggaggcttcttagacattgttttcctaaactcctacccctaggtcatgaaatgtcaatttcactgatacactatctatgtgccatatccgtgctttatgtatcaaaagagtacgattttttttcaacctcccaagaagcagtttttccctcttggccaaatgtctccaagcactgttggtggccatattagaaacagaaagaattgttttttgtgtgttttgttttacattaagtgtattaataaaataggtatactttaacggagtatgttatatataattttctatataatggagctgtttctgttttactttttagcatccgagttgtagtagaatcgtttatgcagcttccctatagagcaaaaaaattcagcctgtactgcacaaagcctgtcacattacacattgacttctgccgagacagtactgacattgtgtaagtacagtttcttaagtccttcgaatcattagtaaaagccttctatcaagtgcacgatctttgtatgaagtcagttcctctgtagaagtgctgagcaggaggtctctgttcttcaggaggggcttctgagtcagtgtttgtctgacctggctgtggttgagggggtttggagcagggcctgagctctgtgcttcttgcctttgtttcaaacttacaaaaagtaataaattaactgtaaagaaaaatattcataaaacataggatcatggagtattatacatgtgtacacgcgcacgcgcgcacggtctcacccttttgcccgggctgtagtgcagttgcatgatcatggctcattgcagcttcaccctcctgggttccagcaatcctcctacctcagcctcccaaatagctgggactacaggcacatgccaccatacccagctaactcccctcccctcccctcccccactccctctccccaccgcccctccgctctcctcccctgctcccttcttgctttctttttttgagatagggtctcactatcttgcccaggctagtttcaaacttctgggcttaagcgatcctctcaccttggcctcccaaagtgctgggattccaggcatgaaccactgtgctgggcccatggagcattataaaagagtccattgcaattttctccaggcccacatctttcctcctgggaggcctctgtgatcttttccagctctgaacttgcaggcctttgtcagtgcttttacacacacttatctatgtggagcttttaacgaaaattagaacatactgtcctatttgcagaattaacttaagaatatgtgttgaggccaggcgcggtggcttacacctgtaattccagcactttgggaggccaaggcatgggaatcacctgaggtcaggagttcaagaccagcctgaccaacatggcaaaaccctgtctctactaaaaatacaaaattagcctggcgtggtggtaggcatctgtaatcccagctactcaggaggctgaggcaggagaattgcttgaacccgggaggcagaggtttcagtgagccgaaatcgcaccactgcactccagcctgggcaacaagagtgaaactccatctcaaaaaaaaaaaaaaaaaagtatgttgaaactctttgtcaacatacgtatctcttctttctacttttagtctttttcgtgggtggatgtgattgacatacttgctgtatttaatcattcccctctgtgtagccactaggttgtttccaaaccatttgcacagtacagtcccgtaagtatatggatgaatctgaccgggcctggtggctcatgcctgtaagcccagcactttgggaggctgaggcaggcggatcacttgaggtcaggagttcgagaccagcctggccaacatggtgaaacccatctctactaaaaacacaaaaattagccaggcgcagtggtacgcgcctgtaatcccagctactcgggagactgaggcaagagaatcgcttgaacccaggaggtggaggttgcagtgagccaagattgcgccactgcactccaacctgggtgacagagtgagactccgtctcaaaaaaaaaaaaaaaaaaaaaaaaacaaaagaatatagataaatctgtataaaatacacagacgtagaggcatatatatatacgtgtgccccgcaccccatctttgctccctttttctagtgtttgactgcatcgctagtgtttgtacaggacagatccctgccctgggcagttccctctcgggtgcgggcgccatgtctgctgtcttgaatgagcactaccgagtggcctgacttctgcctcctgtggtctgtagagacatcagccccatcctcccacccggtgctcctcctcttctcccttcccgggacgatggcattatggaaggaaaagccacagggagcagtccagttctgactccactggcatgccatgttgcactgtgtactctgaactcagaagctgccttcatgggctgtttggtgaccttcccattctccactcaccccagcccccacagtttccttgtggtggtgagtgcatcactcttgcggctggcgtggcatctacactgatgtgaggataagtccctgctgaggccaatgcgccctaccaggccgccctccagccagccccccccactactcaccgaaggctctgggagtgggatttgctgcacacagcagcccctgccccctgtactgccctctttcagagcggcccactgcccacccttcaggcatgattggggcccctgtgtgtgcaacccagctcccctcagaggcagttggtcctgtctttcttgaccttctctgcatgggctcttcccagaacaaatgtgggcttccgggcccttccccacccaacctaggatgcccccagggaagggcctactggggtttggtcaccttctttgacatctgatgcctttgtgtttgtgttttatgcagaacacccttttaacgtgtgtattacagttttacagattttgtcaaattccccttcaaaaagactagcaatttatactgccatcattggggtatggaaagcactgttattcccacacaatattgaatatcgttagactttctaatttctgcttgtttgctcagtaaaaatggtatttttatttttctgacttgcaaagctgtcacatgtattcatgtgattattgtgtatgtgtgaaagagggagagagagagaatggctgatgtggttattctgtgtgtgtgagagagagggagagactggctgatgtggttattctgtgtgtgacagagagtgggagagagactggctgatgtggttattctgtgtgtgtgtgagagagagagactggctgatgtcattctgtgtgtgtgtgtgtgtgtgtgtgagagagaaggagagagactggctgatgtggttattctgtgtgtgtgagagagagagtctggctgatgtggttattctgtgtgtgacagagagtgggagagagactggctgatgtggttattctgtgtgtgtgtgtgagagagagagagactggctgatgtggtcattctgtgtgtgtgtgtgtgtgagagagagaaggagagagactggctgatgtggttattctgtgtgtgtgagagagagagtctggctgatgtggttattctgtgtgtgacagagggggagagagactggctgatgtggttattctgtgtgagagagacggggagagagactggctgaagtggttattctgtgtgtgagagagacggggagactggctgatgtggttattctgtgtgtgagagagagagagagtctggctgatgtggttattctgtgtgtgtgagagagagagagtctggctgatgtggttattctgtgtgtgacagagggggagagagactggctgatgtggttattctgtgtgtgacagagagggggagagagactggctgatgtggttattctgtgtgtgacagagagggggagagagactggctgatgtggttattctgtgtgtgacagagagggggagagagactggctgatgtggttattctgtgtgtgacagagagggggagagagactggctgatgtggttattctgtgtgtgacagagacggggagagagactggctgatgtggttattctgtgtgtgtgagagagagagagtctggctgatgtggttattctgtgtgtgtgagagagagagtctggctgatgtggttattctgtgtgtgacagagggggagagagactggctgatgtggttattctgtgtgtgacagagagggggagagagactggctgatgtggttattctgtgtgtgagagagacggggagagagactggctgatgtggttattctgtgtgtgagagagacggggagagagactggctgatgtggttatcctgtgtgtgtgagagaaggagagagactggctgatgtggttattctgtgtgtgtgtgtgtgagagagagagagagagagggagagactggctgatgtggctattctgtgagagagagagagggggagagactggctgaggtggttattctgtgagagagaggaggggagagactggctgaggtggttattctgtgagagaggaggggagagactggctgaggtggttattctgtgtgtgtgagagagggagagtgactggctgatggggttattctgtgtgtgtgagagagggggagagagactgactcatgtggttattctgtgtgagagagggagagactggctgatttacttgttcatatgttagattgggttttctcttgggttgtttgccttttcattattagtaatctactacatttttcttttttaaaaaagctaattattaggtaattctttgtgtgtaacaaggttttagaaccactgcctttactgccttttagaaatcctttgtaattctcttgaattgtttaatatctttcttataagaataaaaataaccaacatttttgagtaatgattatgtccaggcactgggctaagtgttctatgtacattatctcatttgatctttaaaagaattcttggaggatggtggtggcatctctggtacataaaatcagaagaaacatagaacatcattctgacctgacattttatttttttccttgcttccaagtttctcctctttccccactgcctacagcttttcctacaattttctttgcaaagcataagaaagatgtagaaaggacaagatgacaggggtaaaatgggagccagtgagagggcgctagggtcagcagagtgaggaacagtagttttatagtagccgagacccagtgcgttagctcacgcctgtaatcccagcactttgggaggccaaggcaggagaatcacttgagcccaggagtttgagaccagcctgagcaacatagctagaccctctctctattaaaaaaaaaattttttttaatcgctgagtgtggtggggcacacctgtagtcctagctactcaggaggctgagatgagaggatcccttgagcccaggagttcaaggctgcaatgagctgtgttcatgccactgcactccagcctggataacagagagagaccctgtctcaaaaaaacaaaatgaaacaaagatagtatctggctctcccatgactgcctgtgagggtgtcggtgtaccagcatgtgtcgcgccctctctgtgccagactgtgttagacaccccacactcaggatccctgtcccaggagcttgtgttctggttgaggagactgatttgtctggggatggtggtggtgtgacagacagtgcagtggtgagcacaggttggtctcagtggggcctctgtgctatgagtctgcaccggtgcaggtgacagtgttgagacgagcgtgttgcaggatgcagtgggatcctcacccccagagcagggccagtgccaggtgccccatcatctgcatcacgtgttccatatgtagtgtgagaaatgtccagtgcatggtttacaaaatgctgttggtgtgctagcctcagatttttatgtaatggagttgcatctgttcactgttccagacctgccaagaagtgggacaatgcagctattcagtactttcagaaccttctgaaaggtaagccagtgcctgatcactgcagcctgcctggaagtgacacccacagaggcctcagcttctgctgctggcgggggttggagatgcccctgttggccaaacggccctcctcagaggagttccctaagctacctggggcttcctccagctcaagtgccacagtaactctgcacccctagtggcagtggatgtcagtaattgacagctgagatcagcagggggctgtttgtgcaggggaacccttacacagtaataatacctgcctcttcgtttgcataaaagctgcggcgctgcaaaataaattcatgtggattttattgtaccagcaattgatgaaaaacctagcatttttagtgagcaagagatagtaaatggatatttattgtgtaatattcattacttctaatttaagatgcataaaatgtcttcagctgttctttttattttatatcagtgactataaacagtgtcttttgtgggatctgtcttaacctctggcagtcagatacctggttttagtgatagggttggtggatgggaaacacctggggtgctgcctggtgcctcgttgggtcctggccccactcctgtgctgtgtcatcatctgggtagaggaggagccagaccctttgacctgggagcagtgggaggctgggaggtcactgtgactggagttttggcccctgtgagccatgggggctgctgggagatgagaatgcgggtctggaggaggccggccacttagtcctcagtggctcaggcaagtgacttagcctctgagcctggtctcctcacctgtgacatgaccactgtacttaaccttgaaggtagtggtaagaactcagcgaaagaaggtttctaaaggacttagcacagcacctggtaggtggcagtgatgctgctgctgcggggttttgagtctctaagggagtagccgggtgctgcactccgtggggctttgcagggtagaatggacctcagatgaaggcctgggactggaaatctgggtttgggaggcatggagaagagaggaccacagggtggcacaggaacctgttgacagggacaggacccataatccactccacaatcaggagtgccttttcctaacatgctccccctggtcctgcccgaggaagacatttgggcactcttaagtggttagcagaggttactaggtgggaaatcgtcatgattgtttcaaatatacttttaacatcagctgatttgtgttttcatttatgctatttagcaactacccaggtggaagccagattatgtgctgtggaagaagatacatttgaggtttacctttatgtaactataaaagatgaaaaagtaagtgaaagaattgtatttttataatatttcatcattttaaattttactttaataaaacagaataaatgccaagaaaaacactgtagttcgtacagcatagaaattgtcttaatctcttaaggtctatcttagacccgaagttagccaggtctgtgttttcttcttttgattactttaaaaaatgactttggcattttatttaaacatggtcaagaaattattcctatagtgatgagcatgaaatgttgttttcttctcagggaacatgatttttataaatatactaatttgctgtagcgttagttcactgcctttccccctagactttctcactgtatgtaacgtgcttgctgtaaataattcagatcacaagcagaaagaaagcggacatcatatgtgagtggcccctacctctgccaggtgccagctgctagcattttggcctctgccctttctgaaggatggctcagggcacacctcagcaccaggcagaggtggacagaaggggcacacatccagggctgctcagagcccatggagggtaccttaaccatggattttttaaaaattgtattttgaaatagacttacagaagagatgcagaaatagtgcagaaattttgggatatgctttgcccaggttgtcctgatgttaacatagcacaaaaccacagtacagtttttaaaaccagaaaagtaacattgataaaataccactgaaaacctgcaggcaggtgaatgttgacagtttcccggctgatttcctttttctgatgtaggatctgctccagcacctcccactgcgcctgtttgtcatgtctccttcccctcctctggcctgtgacagctcctcagtacttccatgcctctcatggcattgactgctttggaagagcagtggtcagtggttttgtagaatgttcctcaatttggtttgcctgatgttcctcatcattgtattaaggctatgcatttttggcaagaagcccacagaagtgatactgtgcccttctcagtgcatcccagcaggggtttatgacgtcagtatgtctaattactagtgatgtgaatggtttttttccttcagcttctaagtttggggtacctgtgcaggatgtgcaggtttgttacataggtaaacatgttccatggtagtttgctggccagatcatcccgtgacctaggtattaagcccaaaacccattagctattcttcctgatgctctccctcccccctccccaccccccgacaggccccagtgtgtgttgtttcccccagtgtccatgtgttctcatcatttagctgccacttataagcgagaacatgcagtgtttgtttttcagttcctgcattagtttgctgaggataatggcttctagcttcatccatgtccctgcaaaggacacaatcttgttcctttttatgactgcatggtattccatggtgtgtatgtaccacattttgtgatgtggatgttgatcacctggttaatgtggtgtttgccaggtttttcctgtacagagatgttagtttttccttctgaaattaataagtatcttgtgggggcctactttgaggctgcagatagccatttcatcaatgattcttggctgtgaaagatattactgtggtgtatacctgtttcatctttccctctacatttttctcctctcctctcctctcccttcccttcccctctccttccttcccctccctcccttcccctcccatccgtctctctctgtctcctaggttggagtacagcggcacaattgtagcttgctgcagcctcaacctcctgggctcaaaggatcctcccacctcaacttcacaagtagctgagactataggtgggcaccaccatgcccatgagttgcgatctcattatgttgcccaggctggtctcaacaggcagtcttctcgccttgtcctcccaaagtgctggtatcacaggtgtgagccaccacacccagcaccttctgcatttttaatttttattatttatttatttatttttttgagatggagtctcactctgttgcccaggctggagtgcagtggcgcaatctcagctcactgcaacctcttcttcccgggttcaagtgattctcctgcctcagcctcctgagcagctaggattacaggcaagcatcatcacacgcagctaatttttatatgttaagtagaaacggggttttaccaagttggccaagctggtctcggactcctgacctcaagtgatctgcctgtctcagcctcccaaagtgctgggattacaggcattagccatcacacccagcccccttcttcattttttctttttttagacagagtttcattcttgttgcccaggctggatctcaatggtgcgatcttggctcactgcaacctccgcctcccaggttcaagtgattcttctgcctcagccccctgagtagctgggataacaggtgcctgccaccacaccggctaattttttgtatttttagtagagatggggtttcaccatgttggccaggctggtttcaaactcctgaccttaggtgatccacccgtcttggcctcccaaagtgctgggattacaggcgtgagccaccgtgcctggcccccttctgcatttttaattggaattttataccaaagaaccctccctcctcccccatatattaattattcgataatttgtattagtatggacttttggaaatgtattttatttggggagttataatctataactatcattattgccttgctcacattaccttggattctggccattaggtgctccttcaaaggggcttttgtatactttcaatgtgccccatcattacttgaacactctttactctctgatgccacaatgtttatcattttgttatttgccagacctagccctagaatcagccacttcttccttttttttttttttttttttgagatggagtctcactctgtcgctcaggctggagtgcactggcgcgatctcggctcactgcaagctccacctcctgggttcatgccattctcctgcctcaacctcccgagtagctgggactacaggcacccgccaccacgcctggctaattttttgtatatttaatagagacggggtttcactgtgctagccaggatggtctcgatctcctgacctcgtgatcctcccaccttggcctcccaaagtgctgggattacaggcgtgagccaccgcgcccggccactggaatcagccacttcttcaagcagctctggttccttttattgaagaatgatatttaaatatctagatgagggcacttggtgtgcttgttccaactggggtgtcatgattgtaggtcctctcagcagaaaatattaggaaatatatgtatgtacttgctcccatgcacacacaaatctatatttctgtatccatctgtacacatattaagagctttgatatctctgatttgaatccagcaccatagggttcattcttaccctctcctttccttatttattcatttattttttggagacagggtcttgctatgttgttcaggctggccttgaactcctgggctcaagtgatcctccagcctcaccctctcaagtagttgggactataagcgcataccaccatgcctggcctcttattcttttttttttcctgaaacggagtcttgctgtcacccaggctggagtacactggcgcgatctctgctcactgcaagctccacctcctgggttcacaccattctcctgcctcagcctcctgagtagctgggactacaggtgcccgccatcacacctggctaattttttttttttttttttttgtatttttagtagagacagggtttcactgtgttagccaggatggtctcgatctcctgacttcgtgatccacctgtctcggcctcccaaagtgttgggattacaggtgtgagccaccacgcccggctggccccttattcttaatgcctttctccaccagtgagaaacctactctcgttggccgcagtctacgtatttgattcatccatgtattcacattaagtaatttcaggattgctaacccacactcctgtgaaaacaaaatttgtatttagtcttcacattatgcagccaaaatactgtttgccaaagttacttaggttgttttttctctttcgcaccttcttcagtgtgattatgttattcttttgtaatggggttcatttgttactgcttatattgcatgttgggttccctaaatgttcctcacatcctggttcattttacctatgacttttcattacttattttataacttagtaaaaataccaaaatcagccaaaggctgtgacttacacctgtttaatcccagcactttgggaggctgatgtgggtggattgcttgagctccggagtttgagaccatcctgggcaacatggtgaaaccttgtctctacaaaaaatacaaaaattagctaggtgtgatggcttgcacctgtagtcctagctacttgggaggctgaggtgggaggatcacttgtgcctgggaggcagagagccaagatcacaccactgcactccagtctgggtgacagagcaagaccctgtctcaaaaacaaacaaaaaaaaccgccaaaatattggctgcagaaccagtcgttttttttcatttttttaaacctgagagatctatcctgtaaggaccagtcttgtaaaatatctttttttcaaataaattctctataaacttgctttcttcttgcttttcaaaagtagatctctttctaaccatgtaggttgtatgttgataatgactctatcttttttttttttttttttttttttgagatggagtttcgctcttgttgcccaggctagagtgcaatggcgcaatcttggctcaccgcaacctctgcctcctgggttccagtaattatccagcctcagccttcccaagtagctgggattataggcatgcgccaccacgccgggctaattttgtatttttagtagagacggggtttctccatgttggtcttactttaaggtggtaaagtgcagaaggcagggaggttcgtgcttagctgagagagcttataatgcatgcatgagatcataactgccggaggaaaaaatgtgggccagcaatcctttaccagctcccaaaggtggcaacaggatgtgtcccaaggtgttttcttttttggtctggcttctttcatttggcaaaattattttaagatgcatccacgtttgttgttgttgccaagtcctcttccattgtgtggatatactacagtgtatttacccattaactcgttgatggatatttgggttgtggccataggccccttacagatatttatgtacaagtcttcctgtggatctgtgctttcatttctctcgagcattacctaggagtcaaacttttggatcatattgtaggtattaagaagctgccatattgttttccaaagtggtggactattttaccttcccatcagcaatgagagttctagttcctccatgtcacttgtgtaaacattcggctaagtgtgcagtagcacctcattgtggtttaaatttgcgtttccctaatgatggttttatatgcttatttgcaatcttcagactttgatgaagcagacattcagattgtttgcccatattttaattgtgttgatttcgttttattgagttttgagagttccttatatattctggatacatgtcatccggatacttgattttaaaagaattttgcctcatctgtttattctcttgaagaacagaaatttaaaattttgagcaaatccaatgtaacagtctttcctttgatggttcgtgttttgtctctgtcctcccaccaggcttttgcctggccaggtagttttagtgctacagtgcgtatgtccaagaagacatctcatgtgtttcacacagatgcttgctgtttttcctcatcaggattggtgggaagtatttggtttaccagagcaggagtcaaatctgtttctctcagattatgttctgtaaaataatttctctgaaggtagaactttggggttaagtttggaatatttcctttaaaatcgcttgactatatttgtcttattagtcatgaaatgtttaaaattttacaggtttgtgttaatgatgatcttgttgcaaagaactatgcttgttatatgtcacctacaaagaataaaaaccttgattatttagaaaaaccaagattgaatataaaatcagcaccctccttcaataaactcaatccagcacttacactctggccaatgtttttgcaaggaaaagatgttcaaggaatggaaggtgagtagattctcatcatatcaatttcccttacattgttttattaataatcttagtgtatagatataagttgtacagacttttccccacatggagacaaagacttggactctgtttaaagtttaatcctgatgaggctgtgacacattgtaaggtcttaaagtgttacagtttgtgtttatgagaccaggaaaaaaactgccctcgatttctgttttttttttgagacggagtctcggtctgtaacccaggctggagtgcagtggtgtgatctcggctcactgcaagctcctccccccaggttcacaccattctcctgcctcagcctcccgagtagctgggactacaggcacctgccaccatgcctggctaatttttttgtatttttagtagagacagggtttcaccatgtcagccaggatggtctcaatctcctgacctcatgatccgcctgtctcagcctcccaaagtgctgggattacaggcgtgacaccgcgcccggcctcaatttcttattaacattgagttatgttgttagaagtccaaatgtttgcaatttagagatactaagaaaacaaattttgaatatttagactttagacacctttaaaaaaaagagctatttatcacaaataacccttagcataaaaatataagagctagtcacggattgtggaaataatttccaatgtttctgtccacatccagtttttagtcccctcaccttgtgtcccctagtcaggtttcctgtaacctcagagcaaaagcaagagcagaagtaatgtactaacgagttcacatttttattttgggctttatttcatgctttaattctgaaatttattctttctatcagattcacatggtgtaaattttccggcacaatctctgcaacatacatggtgcaagggtattgtcggtgacctcaggccaacagccacagcacagggtgagttctgctaatgtggtttatttcataggcagcatgaaaaaaatattcttagctttttaaagattagaaaggttgtctagaaaggccatggtaattctttctcttttcttaatttaatgtaaccaatttgtgatgtagatcctgaaagagttcatgtgtcctgcatttcatacttagaaattttactgtcacgtaaagaacataacaggcaccagttcatgtgcaggactgatttattccagcctagccatcgaccagtaatcactgtctgtccctagagtgtacatatgtatttattattgatttttcacttaggcaacaggatgcataaaaatagggaagacatgcttatgagggcagaaatacgtagttttaaattccagtcttcaagatatttaatgaattggaattgctgggtgagggtgaaatttttcagcccctttgatgactggctcgccctctgtggtggttcctccaccatttccctcttatgctggatgtgtgtccaggaaggcctcacttcatgtcttggataggttcttggaaactgactttaagtgaaacaatgttataacgaaacaaccttgagcaaagcaacttaatttgaggggctgctgtactttgtttcccttaaatctgtggtttccaagaacctactgatgagtcaagtgaggacttactgatacctgtgggtgtaatatttcatgtgtatccatagtaaaccacaactacattaaagctttagccaactaaaatatttcctgtacttcagattattttcaattactttggtaatgttgcttatcatagagaaagaaagatacaaagggtttttctcagccactttgccaactagggtcctccatggctggcagtgcccaccccgtccccgacctgggcctcactcagccctgggcctggccgctggaggctccctacccactcagcccatctgtgctatagattgtatccgcatttggcagttcccaagctcttgtcctgtgtccaagaagaataaggttatgctgacagaagggtgaggatgggcagagaagaattttatggagcgatggaatagctctcagtgtaacctcattcttcttggatgggtggtttctctctcagtgtgtccgggctggcactttttatggactcagaatggggagtgcctgctgattggttagtgagtatgcaaaaaaggttaaagcaaacacaccactcaaaggtgggtatagcagtgtagaaaaccaactaggaaagggtaggtgcatatgaaataagtgaaaggtagacatcaatcagaggaaaaaatgccaaacggaaagacagtttctcaatccagtctgtgtattacccgagacttgtagctaggctttaaactggtttctgcttgaaaattggttttcaccagggacccaccccatctcgctaggcatttgactgccttttgctgctatcaatagcccagattgtaaaaacctgtcatctcactaactgctttttaaaattgtagagtcagggccaggtgcagtggctcacacctgtaatcccagcaccttgggaggtcaaggctggcagatcacttgatgctggcagttcaagaccagcctggccaatatggtgaaaccccgtctctgctaaaactacaaaaattagctggatgtggttgcacatgcctgtagtcccagctactcgggaggctgaggcaggagaattgcttgaactgggaggtggaggttgcagtgagccaagattatgtcattgcactccagcctggatgacagagtgagactctgtctcagaaaacaaaataaaataaaattgtaggctgggcacggtggctcatgcctgtaatcctagcactttgggagaccgacacaggtggatcacctgagatcaggagtttgagaccagcctggccaacatggtgaaaccccgtctctactaaaaatacaaaaattagccaggcatggtggcgtgtgcctgtagtcccagctactcaagaacttatttgctgcatgatgaaatgagaaactaggatgtaaaaaggaggagtgaaccctgtagactcttttgcattgaaggtaagggtggcaacacagtgtagagagaacaggctcggggctagaagccaggagacatgtgttctaatcctgggtctaccactggcttggtgggagcctcgaccttccaagagcctgcaactgcccatatgtacacggaggggaggtaggggtagactagaaggcccctggagttctagcatgtctcagtctgggaattttttttttttttgagacggggtcttgctcggttgcccaggcttgattgcagtagtgtgatcacagctcactgcagcctcaacctcctggcctcaaaggaggctgcggcaggagaatcacttgaacccaggaggcagaggtttcagtgaaccaagattgtgccactgcactccagcctgggcgagtgagactccggctgaaaaataaacacaataaaataaaatattatagagcctttctttccaaagttttccagacggtatttataaaatttttatttcacagaaatggggtcctactatacatacctctttgtaatgtattttacttagtatatggctgaattccctttctaggtcaaatatatccggtataatgtgtttaaggacataaactctgatgtgagactgccagggtgtcaggccgcttccttctctgggacatgggatgtcatccccatccccctgggagttactgaatgggccatcgtgcagcgtgcttggctcagcgcctggcctgtggcagcctcagcgcatgtggcccctgccccagattctgatatgcctcttgtagggggtccccaggtgagaattacagcagaaggtagcacctgttgttgatgggcatgtattctttccatttatattctttttccattggaggaataaaaataccaggcactacatcatcgtgtttaattattgcgtggctttccattgcttgatatgtcaaaattattttcaggagtcccagcttgctgggcagaaattgtttcctgcttattacaatcagtactggaatgaactatgcttatctttgaaaaggaaaaggttatggtgaacaataacaaaaaagataatgtgaggtgtaactgaattggcatgtaaaaagcagaattattagatgttacttttctaagtatagatttccctttcctttaattattgtgagaaggtacttcagttatatttcagttagtttttggtgtttctctttgaagttgcctaatatttttgagaatcaaagtataatacttggctaatacttgatttgctaatacttgattaaacaatcacatattacagaagggctacagtgaaaaataatttttttatttgcaacctcttcttaccccaggatgtcccctagagataaactcactttttaaagttgtttattttggtattatctccagattttaaaataattgtgtatattttactattactaggcttcttcactttagacattgtcttgatttctagggagattcactctcgtgcccctaacccacattcattcattcatcagatatttatgacgccctcactgtcaggtgcttttctagggattcttaggagggaaacaaagtctgtgcttccatagagtttacatccatcttctcaataaattttttattttacaataatcacaaacttacagaaaagttggagagtattacaaagaacttttttcccaaaccatttgagaataagttgctaacctgattccccaatacttgagtttttcctagaaagaaggacattctcaaaaatatccacaatgcaatcatcagagtgtgaagattaacactgatatattgtgatcatataactcccaggcaccattcaggttttgctggttatcaaagagacgtcgttcagcatcacttgttgcatttagagaagacgtttcttgtttttgttttgtttagtttttgagacggagtctcactctgtctcccaggctggagtgcagtggcacatctcagctcactgcaagctccacctcccaggttcacactattctcctgcctcagcctcccaagtagctgggactacaggcgcccgccaccaagcccagctaattttttatttttttattttttgtatttttagtagagacggggtttcaccgtgttagccaggatggtctcgatctcctgacctcgtgatccgcccgcctcggcctcccaaagtgctgggattacaggcatgagctactgcgcctggccgagaacacatttctttagtctttcctctggaacatttcctgggtctccttgattttcatgaccttgcactttggaagattacagacctattattttgtagaatgtgttctggattttggtcattctaataggggtgtagtggaatatcattattttaatttgcatttctctaatgacgtaggatgtgagcatcttttcatatgcttatttgctgttggtatatcttctcagatgagatatctcttcaggagttccttatttatttatttatttatttagagatggagtcttgtgctgtcacctaggctggagtgcagtggtgtgatctcagctcatggcaacctctgcctcccaggttcaagcctcctgcctgagccccgcgagtagctgggattacaggtgcccgccaccatgcctggctaatttttgtatttttagtagagacggggtttcaccatgttggccaggctggtcttgaactcatgagctcaagtgatccacccacctcaaatgatccgactgcctcggcctcccaaagtgcggggattacaggcatgagccacccaccatgtccggcaaggatttggctattttaaattgacttttttgtcctcttagtgttgagttttaggagtcctttgtacattttggataacaatcctttttttacatgtgtcctttgcaaacatttcctcctagtgtgtggcttgtctctcattctcttgacaatatctttcacagagcagaaatgtttagttttaatgaagtccagctgatcagttgcttctttcatggattgtgcctttggtgttgtctctaaaaagccattgccatactcagggtcatctaggttttctcctatgttattttctaggagttttgtattttgcatttttcatttagatccatttgagttgatttttgtgaagggtgtaaggtctgtgcctagagtcacttttctgcatgtggatgttgagttgttccagcaccatttgttgaaaagagaaggttgggagttttattagagaaatcttacatattgttttgaaaggaagctcattgacgctagagaagtttttgggagctggcaagctctgattggtaggtaatggcggtaggaaaaactagtcttaaagtcatggcaggttatttcagtagctaccaggtaaaactggtgttgggattctagcagtgcacctcaacagcggggccaagaaggtgctctgtgcctcgagtacttttcctctggcccctcgactctgatttagttggagatgaaagaatgacctagtttgtataattaactttcacaggaccattgggtttaaagtgattatttatatacagtcatgtgttgcttactgatggactatgttctgagaaacacgtcattaggtgattttggtgtgcaaacatcatagggtgtacttacccaacctacatggtgcagcctactacacatataggcaatatggtatagcctatggctcctaggccacaaacctgtacagtatgttactgtattgaatgctgtaggcagctgtaacacaatggtaactatttgtgttatctaaaccaatttaaacgtagaaaagatagtgattatgctatgatgttgctaggcaataggaatttttcatcttcattaaaatcttatgagaccaccatcgtatatgtggtctattgctgatggaaggttggcatacggcacgtgactggagttggattactgtctgccatgtttattactgtatttgatttattgcccttgtttttttgttcctcttttgactttgctctttttctaccatttgtgattttaattgggcattttgataccatataaatggtaggaggggtggagagagggaaataaatgtctagagccctgtaattagagtcagtcttctagggagcctgtacctttgggctgcacgcttctcaggtgcccctcagcatccctcacctctcaccttatgtgggacaggatggctggaagggactgagttgtgttattttcctcccccaccagaaggttaaatcgggctgtatttcccttcctctaggttagataggttctgataaactccagtagtttaggctctggttcaatagtttctcctgaggtcaggcccttttgggaaggaacagcacgccctttatatttccaagtagttacttttcccctcttcctgtcgaagcacgagattttcctgtggtattcactgtgagaacctgctagagctccaggaggcagaactcacagaagtgtggcacccagcccctgaccccggagttttaactaacggaggtgtccgtgccgaccctccagcaaattgtcagtttacagttcaggtttccctcctcactcctggtcccatagaagtttattctgggtttctgcccctgtccattctgagtctctctgtccatctgtcagtctctccagtgctggggcaacagtttgccctgtgacctcactttgatggacctaggaagaattcctgatttttcagtgtgttcagctttttacttgttgttaagatagagtgataaccatcaagctttttacatgctcgactggaaactggaaattacactaaattttaaagtgtaagattgacaaatcttggagattctaattgcttttctttttttacttgtattgtccatctttttttttttttttttttttttttgagatggagtctcaccctgttgcccaggctggagtgcagtggcacaatctcagcttactgcaagctccgcctcccaggttcacaccattctcctgcctcagcctcctgagcagctgggactacaggcgcctgccaccacacctggctaattttttgtatttttagcagagatggggtttcaccgtgttagccaggatggtctagatcccctgacttcgtgatctgcccacctcagcctcctaaagtgctgggattataggcgtgagccaccatgcctggctatattgtccatcttcattgactccttaagttgttccagattctcatttatggaaccctatatctgtgtgatttgaatcttttaatatctattgagactcctattatgattcaggtatgatctctcttggaaaatattctgtgtccaccttagaaaaataggtgctttgctgttgttggttagaatgttatagaaatcttaattaggtcatactggttgatagcattgttcaaatcttctttatctttattgattttccattaactgttctggcaattattgagaaagaggttttgaaatagccaactataattgtcttgttttctctttccagttctgtcagtttttccttcatgtattttgaaggtctgttacttaggtgcataaaggcttagaatttttatgtcctctaggcatgggcaaggacttcatgtctaaaacaccaaaagcaatggcaacaaaagccaaaattgacaaatgggatctaattaaactaaagagcttctgcacagcaaaagaaactaccatcagagtgaacaggcaacctacagaatgggagaaaatttttgcaatctactcatctgacaaagggctaatatccagaatctacaatgaactcaaacaaatttacaagaaaaaaacaaacaaccccatcagcaagtgggcaaaggatatgaacagacacttctcaaaagaagacatttatgcagccaaaagacacatgaaaaaatgctcatcattgctggccatcagagaaatgcaaatcaaaaccacaatgagataccatctcacaccagttagaatggcagtcattaaaaagtcaggaaataacaggtgctggagaggatgtggagaaataggaacacttttacactgttggtgggactgtaaactagttcaaccattgtggaagtcagtgtggcgattccccagggatctagaactagaaataccatttgacccagccatcccattactgggtatatacccaaaggattataagtcatactgctataaagacacatgcacacatatgtttattgcggcactattcacaatagcaaatacttggaaccaacccaaatgtccaaaaatgatagactggattaagaaaatgtggcacatatacaccatggaatactacgcagccataaaaaggatgagttcaggtgctttgtagggacatggatgaagctggaaaccatcattctcagcaaactatcgcaaggacaaaaaaccaaacaccacatgttctcactcataggtgggaagtgaacaatgggaacacttggacacaggaaggggaacatcacacaccgggggcctgttgtggggtgggggtcggggggagggataacattaggagatatacctaatgttaaatgacaagttaatgggtgcagcacaccaacatggcacatgtatacatatgtaacaaacctgcacattgtgcacatgtaccctaaaacttaaagtataatttaaaaaaaaaaaacagagcagctgaaaaaaaaaagaatgtttatgtcctcatgatgaattgattcctcagtcattgttaaatggctctctttatcccagatagtattctttgctctgaaatctaccttaatattaatatagcttatctagatttattttggttaatattagcatagtatatctttttatgtccttttagttttaacctatttgtgcctttatatttgaaggggagttcttgtagggagcatatagttgtgtccaatctgtcaatctctgtcttttaattggagtatttaaatcatttctatttagtgctatttatttaaaattttttgtcatttaaaatttttgtgggcacatagtaggtatgtatatttatggggtacatgagatattttgatacagatatgcaatgtgaaataagcacatcatggagaatgggatattcattctctgaagctttattgtttgcattacaaacaatccagttacatctttaagttatttaagacttacagtcaccctgttgtgctatcacgtagtaggtcttactctttctgatataatgtaatgtattgatattgttggctcttaatctagcatcttgctgttagttttctgtttgtctcatctggtttttgttccctttaccctatttttttgctttcttttggattaagcaccttttgtgttccattttaattcctttgttagcttattagccataatttttttttttgagacagagtctcgctctgtcattcaggctggagcgcggtggtgcaatcttggctcactacaccctctgcctcctgggttctagtgattctcctgccttagcctcccgagtagctgggactacaagcatgcaccaccacgcccggctagtttttgtatttttagtagagacggggtttcactatgttggccaggctggtctcgaactcctgaccttaagtgatccgctggcctcagcctcccaaagtgctgggattacaggcacgagccaccatgcctggtcagctgtaattttttgttttgtatgtttagtggttgctttagggtttagagtaaacatctttacttctcatagtctaccttcaagcagtattacgcacttcatggatagcatgaggaacttaacagcagtctccttccatttcctccctcctggcctttgtgcaagtgttttcatgcattttatttatttatttatttatttatttatttatttatttatttatttatttttgagacggagttttgctcttattgcccaggctgtagtgcagtggcgccatctcagctcactgcagcctccacgtcctgggttcaagcgattctcctgcctcagcctcctgagtagctgggattacaggtgtgcaccactatgcccggctaatttttgtatttttagtagagatggggtttcatcatgttggtcaggctggtctggaactcctgacctcagatgatccacccgactcggcctcccaaagtgctgggattacaggcatgagccactgtgcccagactgttgtcatgcattttaattctacatatattagaaaccccacaataattcatcattttttattaagtagtcaattctttctttttttgaaagaagaaagaagttgaattttctaacatgtcataagcgtgcaggcaggtcatcagagtctgtgctgtttctgtcttgttggccttgccatcctgaaggttttgccgccatcctcctattcaatttatttatcactgtatctcccttccagctagctggggggcagggagaagaggtgaagggggtacaactcagaggttgcacatggtgctttctctctcatttctttggccagaatgttcttgtgcagccatgcttaatgggagatgaaggtctgggagaggttgtcctccttttggattgccaggctcccactaaaaatcaggggttctgttacctcagagttagaaaactgcagccatgggccaaatctggtctaccacctatttttgtgctacctgtaagctaaaaatgatttttccatttttaaatagttgaaaaaatccagagagaaagaatattttgtgacacattaaaattatatgaaattgaaatctcagtagttacaaataaagttttactgaacatagctggactcattttcttacatattgtatacagctgcttttgcactgtcagagctgagttgagtggccgcgccccaggccacctgtcccacaatcccacaaagcctgcagtatttaccagctggtgctttgcagaaggagtttgctgaccctgatctggagcaaggactgaatgatattccaggataactaacagaccctgccacactccccagcacagagacttcagattttgtgtgtccctgtaaattttaattctcttttaaagagatttttaagataagaatatatgtttttatatttcccttcatatttatcatttctggtggtggtctttattctttttttttttttttcttttcagagacagggtgttgcactgttgcccaagctggagtgcagtggtgtgatcatgactcactgaagcctcaaacacctcagcctcccgagttgcagggactaggctcacaccaccatgcctggctaattttcaaattttatttagagacaggttttcattatgttggtcaagctggtctcaaactcctgacctcaggtaatcttgcccgcctcggccttccaaagtgctgagattacaggtgtgagccactgcacgctgagacctttctttggcttactttgcttggatggagcacatccataccctaagggcagggtatgggagctgtttctcagctcttgagccctgttactctcattgcaatggcagaggtggctttctggattgcagatcaatttcctcattacttatgacactgcacatattttcatgttccttttggcaattcgtctgttctcctttgtgaaattcctgtttacgtgttttcttataataagctttgagagtttttattttttatggagacagagtctccatatgctggccaggctggtctcaaactcctggcctcaagcagtcctcctgcttcagcctcccgaagtgctgggattataggtgcaagccactgtgcctggctgagtttttaaaatatattctggagacgtcatttgtattatagatagatttccttctagtctgtggcttttcattttcttaatggtatttttcagaggagaagtttttgatttttggtaaagtctagctaatcctttttcttttaggattttatgtcctatttaagaaatctttgctttctctatattttctacttttggcttttacatttaattctaggatccatctcaagttagtgatgtgaggtaagggtcaggatttggttttgttttttccatgtgggcatccagttgttccactacatattattttgtatttgtggagctgcatcttcaaggtgggttcctggaagaagggtttctggtcaaagaatggttttatctctgttgccaggtgctgtgggtcctgtatcatctgggagtctcatgggaatctaggagactgcctgtttgcccatagcctcaccagcagagtttcaagtttttggatctttttcagtttgcagtgagaaatagtatcttagatgagtttgcatttgcatttctcttattatgagtgccacttatgattctttaagaagtcacatacattaattgtgatttttttttttttgagacagagttttgctctcattgcccaggctagagtgcaatggcacgatctcagctcaccacaacctccgcctcctggattcaagtgattctcctgcctcagcctcctgagcagctgggattacaggcatgcgccaccacacctggctaattttgtatttttagtagagacggggtttgtccatgttgatcaggctggtctcgaactcccgacctcaggtgatccacccgcctcagcctcccaaagtgttgggattataggcatgagccactgtgcccagccttgttgtgatttaatatatatttggacgtcttttcatcatctcattttgtgggtatgtgttctttttttttttttaagacagagtctcgctctgtcacccaggctggagtgcagtggctcactgcaggcagtgagatcatggctgactgcagcctctgcctcccaactttaagcaattctcccacctcagcctcccaagtagctgggattaaaggcacgcaccaccatgcccagctaatttttgtatttttagtagagacagggtttcaccatgttggctgggctggtcttgaactcctgacctcaagtgatccacctgccttgggctcccaaagtgttgggattacaggcgtgaaccaccactcctggcctctttttgtgttttctattgaccgtaattttcctttctattttctttattattttctgcctcctcttgaattgaccattttccccctcttccttttttactcttatatatattgtatttcatttctctgagccttaaattttatatatagctatactttctaatgaagtttcaaggtcatcattgtctgtcctcacatcaagaacgtcacattttcttttctaaactcctcttttcatttctgttctgttttctaaaattttaatttaacttgttttgtaaatgcattttgcactcagtttttctttcaagttctttggagtggaattgcttgggttcgaatcccagatctgttctttattagctgaaataaacatgggcaagttatttcacctttctgtgcttgcttttcctaatctgaaaagggggaaataattgtgcccgtagagaaatcacatggaattcaataacgcacatggtacctatcacatagaattgaatcagttaattcatataaagcatttagaatagttcttgatataagtactaagtagatgttgattatataattaatattattgtactactggtttatttttctcattccccaaatatatacttcgtagttctttaagtagggaggtgtctttgttcacgttgctgtaaaggaatacctgagacaataatttagcaagaaaagaggtttatttggctcacagttgtgcaagctgtataagaagcatagagctggcatctgcttatggtgaggcctcaggaagcttccaatcatggcagaaggggaacaggagctgcatgtcacctgtcaagagaggaagagagaaagtggagggagtgctaggctatttatttatttagattttttgagatggagtcacactctgtcacccaggctggagtgcagtggcacagtctcagttcactgcaacctccacttcccaggttcaagtgattctcctgcctcagcctcccaagtagctgggactacaggtgtgcgtcaccacgcctagataactttcatatccaggatttcaccatgttcagcaggctggtcttgaactcctgacctcaagtgatccacccacctcagcctccctaagtgcagggtttacaggcatgctgttgcacttggcctgtttggtttcataaatactattacttcttttatttcttggatattttaattcagtttatttgaaagtccttttcagacagatgttttatcttcatatcgtcagatgtggatatttctctcccaatctccttttttttttttttaactctttatgatggcattgaactactttgcggacttagtgatttttgtttgagagcttatcttgcatgaacatttctctcttggcgaattttaactaccacctccactcctggttccagagtttatctttttggctaaaaggttaattacctgataatgtaattccaaaccagaagaccacgtgacatgcagacttgggttccaaattactttaaagaagggttagggcattttataatatttcacatttctagtgctgctgcttatttcaatgagttatttaataggtgaaaggcgtatcttgtcatttcaatttgtgttccttttattaatagtaggacacttttctagaattgcctctgtgtttccctcataaatgattgccgggtaaaacaacagccattttataatgctcatgggttctgtggtcaggaattcggaatgggcatggcaggagggtttgcctttattccacactgtccagggcctcagacagggagacgtgagggctggcattaactaagtgggggcagtgatctgaggactcaggcacgttctggcagttgatgctggcttttggctgggacctcagctgggactcttgtccgaaatgtcctggtatcctttccatgtggctgcttccccacagcgtcatggctgggcttcaaatgtgagcgtccaagaccacagatcctgagtatgtggccttttcgtaatgtcactttagaagtctcacagcaccacttctgggtgggttatgagcccacccaggttcacaggaaaggatcatagagcccacctcttggcaggaggcagagtcgcattgtaagaagagcctgtgtgttgggagatgttgccatggtcttctgagggaaatgtcatctgacaagttgggaaaatactattgtgttccgttattagctggtatgggaatttttagaacattttaattgtttttacaataaaggttgagacaagattttaaaatttaatcccctcgagtaaggtttactacaaattcatattccataaaaatttaacatattaagattttataatggtatttgcttttattatattcctttttatcctattttctattaatatcactttttggtgtagcttttttattaccatttttattttgcagacaaagctgtaaaatgtaatatggattcattgagagattcacctaaagacaaatctgaaaagaaacaccattgcatctctttaaaagatacaaataaggttgtattttaaaaatgttctttaaatacaaagttcatatagtgttaattttcaaattttctcttttgaaatctatctgaaaccaaaaatatgttttctattaaaaaatcattggccatgatagtttccttcatgagaaaatatagtttgcttgtttgcttattttgaaaggagaaagtagctccagcttcttcatgtcgagctcttgttctcggcctagttttctttctacaaaattggatattgatcctccttttaatgaaggtgtgaaaatctgggattccagggcattgtcctagtgaagtgcaagtctaatctgctctccgtccctttgacaagacaggttgaaagtaattgcaggacattttaagtactgacgatctggaatgccagctgcctgccatttggacatttaatgtagtggttatagcgctggcataatcacccaactttccagttttttatctctctatctctgtgtgtgcatgaaagatgtctgggatggttgttcatgagaataactcccatggaattttggttccaaaagaatgtatattatgttgctagcatacacattctttctgaagaaaagttttcttttacagcgtgttgaatcctcagtgtactggccagcaaaaagaggcataaccatatatgctgatccagatgtaccagaagcaaggtatgatttgaaaattcaaactgggtgtggtggcgcctgcctgtagtcccagctactggggaggctgagctggggggatcgcttaagcccaggaggtcgaggcttcagtgagctatgatcgtaccactgtactccagcctgggtgacagagtgagactcttatctctaaaataataataataataattcggtgtaattgacaagagacttaagagtgatgttgtcttatacagtgttctataagattgatgattggaaaatagtccattttcaaagagtggcccaggaaattttggttaaacatattaacttaaaggaaaaatgtgacacctggttggcagcaaagttgactgaaaactggtagtggccctagagtctgtctcctctttgcctttttggacagagttgtccctgtaaggcaggtctgaagattggcacagagtggtcctgatgagagggatggcctcacgtggccagatggcagcacagggtgggtggttacccagggcggaaagagaagaatggtttcgtgagtatcagaggctgggtctgtactttgtcctcttcaagatacatgtcagtgacgttaacaaaattgcagaaaggatgtaatgttgtaccacttcttgaatggtctaagaacacacttcccctcgtgtcgtggactttatgctgtggttgtcatatgttgtacttttacatatatcataaatgctagactctatctcacttttatttaaatagtcaattatattctagagagagttaactaacaaaaatatcttctctctttacctgtgtggttgcattggtgttctttactttttgtgtagctccatatttccatctggtattattttccttccacctaagggcttcctttaatatttcttgcattgcaggtctgctgttgatgaactctttcagcttttttttttttaaaagtattcattttaggttcattttgaaaaggatacctttgctaggtgtagaattctaggttgacagcactttatttaaagatgttgtcccactgtcttctctcttgcattgttcccagcactgcctctgctgtcaccagtgcctttgttcctctgctgtttcctctgactgcttttcagattttcttttgattactggttttagcaatttaattatgatatactggccaggcatggtggctcacgcctgtattcctagcactttgggaggccaaggtgggcagacctcacccgaggtcaggagttcaagaccagcctggccaacatggtgaaaccccatctctactgaaaataaaaaaaagttagctgggcgtggtggcaggtgcctgtaatctcagctactcgggaggcagaggcatgataattgcttgaacccaggaggcggggtttgcagtgagctgagatcacaccactgcactccagcctgggcaacagaacaagactccgtttcaaaaaaaaaaaaatcataatataccttgctgtcgttgctaccatatttcttatgcttggggttcattaatgttctttgtttgtagctttcttacatcaaatagtcattatgtctacaaatatttttttctgcaccaatctttttcctctccttttagagactctgatgaaacaaatgtcagatattttgatattgtccaaaaagtccctgaggctctgttcattttttcagcctttcaatcttgctattctgcagatcaatgattctactgatctgtctgtacattcattatcttctgtcatccacattctgctattgagcccatcctgtgagtattctatttattatatctatatttttttgcgacaggatcttgctctgttactcaggctctcaagtgcagtggagcaatcataactcactatagccttaaactcctgggcttaagcgatcctccggccccagcctcccaagtggctaggactgcaggcatacaccaccacagctggctaacattttaatttttttgcagagatggaagtctcgctatgttgccctggctggtctccaactcctgagaccaagtgatcctcccgccttggcttaccaaaatattaggattacaggtgtgagccactgtgcccggcctatatttcttgtttctaaaattttccttgtttttttttttcaaaagtttatatttctttgctgagaacttgtgtgtttccacttgggagtgctggccttttcttcttgtggagtgagtgtccagagattgccaccctgagccaccagaggttggcacctgctgattgtcgtttcccttggcagtcgatctggttttcctgggcccgtgtgtgctgagtaactttggactcactctggatattttgaatgttatgttgcgagattctggtttctgttaacattctctagagagtgttggttggtgtcatttgtcttagcaggaggtcggtacctccatgaggtccggccctcatgttctgccttgcgaactgtgggtggcggtggccgtgtgagctcaggctctgggccctcgatgctgcctggggcctgttctgcatctgcttagcttggggcgagttggggcttgtgttgggtcatgaaccacctctctttcttttcagaatttccctcacagttaccaatttctagggcctccttccccgtattcctctggccagatagtttctcttggagacattggtgtgcagtaatgtggaattgggataccttgagaataaaacaagtaagggagaaaaaaggtggagattttcctcacgcagtctttggaccacagctcccatctcccagttcctctggcttcaggtgcaggttttctctcagggtttaaggtcaccacactgctgttgctgttgctgggtgcagccccaagatcagagctggccttggggcccggtgaggaaagaaaagaaaaacaatggggattccccacactttctggtttaaagggcgcctcttcccgcttctctggcttgaaggaagaagtctctcctggagattctggcgtctgcacctgccacaaagtcatcttgaggtcaacacagagacacagagagaaaaaagacaagaaagtcctggtgattctgtttttcaagtgtttgacttctctcccctgctgttggggcctcatccagaatctctagttgtgatcagcaggagagagaggctgtggcaggcctactccatcctgtccagcaccaccaccagaagtgtcagaaatgacttttatacttaaaggactaagctccagttctcacagaaatgtgcttatgtagataaaccaattcctcagtggtgcttcttaaatttttaatccagaaaataaagatattttcaggattggggtaaaggggttcacaatttttcatttttttaagagacagggtcttgctcttgttgcccaggctggagtgcggtggcacaatcacagctcactgcagtgtccaactcttgagcttaggcgatcctcccaccttggcctcccgagttgctgggactataggtgcacaccaccatgcccggcattttttatttttttatttttgtcgagatggggactcactgtgttgcccaggctgctgttcacaaattttaatgaatttttttttttcatttctagtgctttaagtcagaagtcaaatgagaaacctcttagattgactgagaagaaagaatatgatgagaagaatagctgtgtgaagtaagaattttttccttggcctgaattgtgtattgaaataattataataaaattataaacaagagaaatctacacattttattattaatttcaaacctgcattcccatcaaaaaataaatgtacagtatatctcctgtagggtttgaggttaatttttgcttttccatccacttgggcacatttttctgtttaaagctttgttccagtgtaagtagtcattttctaccttgccttctggattctcttggtgaagtgaacagtgtcacaaatcaaattagatacagttgatcttttggggctgttgatgttctttgggttggtctttgctttctttccagttctctgaggcaacactgctagagaaactgagcagtttgccttgatttcatacttgtgtaatctgtaaaatatttacatagcaattttcgttttgagacaaggtcttcctctgtcatttaggctggagtgcagtggtgcagtcacagctcactgcagcttcgacctcctaggctcaagcgatcctcccacctcagcctcccaagtagctgggaccataggcatgcaccaccataactgatttacatatatatatatatatatatatatatatatatatatatatatatattttttttttttttttttttttttttttttttttgtaggacgagggtctcgctatgttacccaggctggtctcaaagtcctggcctcaaatgattctcctacctctgcctttcagagtgctgggattgcaggcatgaccacagcttccagcctcatgccatttttatactttttaccatattggcctcaacagttttacattccaagtaactgtagctgccctggagctcccagagtgacaaagtgtgagacaggtcagaggtggggaggtcctgctgtttccactggttggccttgggggttggagccagggtgtggactctgcagccatgtgggcttcccagcttcccagaggccatgctgatgacctgccagggcttcttaccccacaggacaccacccaggatttcaagggtgaggctttgaaagcttccacgagcccacagagttggggatggctgttgatgcacctaactgacacccccctcccagggcaacctcagccctaatacccaaaggttttgctgtcacagtcgttattttccttggaacagaaggccatacagcttatttctttcttttattattttcaattataacctggcaaattaaccctggaatattctttttttcattatttatttatttattttttaattggagacggaatcttgctctgtcacccaggatagagtgcaatgacatgatcttggctcactgcaacctccacctcctgggttcaagcaattctcctgcctcagcctcctgagtagctggaattacaggcgcctgccaccacgtccagctaatttttgtatttttagtagagatggggttttgccatgttggccaggctggtctcgaactcatgacctcaggtgatccgcccaccttggcttcccaaagtgctaggattacaggagtgagccactgtgcccggatgaccctggaacattctattcccttttattttcgtattaaaaagttctgtcttgtctcctgttctgttaaaatgccctttacttagaacccactgattaaacaacatcagttatcctgtcagtctcctgtgggtttcagggaactttgaggtaattcaggattaaacatcaaagaaggctttgagttccttagggacacagggatgacctggtgatcctgggaccctcccccttgactgcgcagaggtccagcattggctgcactgcgtccaaagcctggggaaccctgtgctgtcatttctggcgagatagccaaggcagcctggaggagaggcaccctttccttaaggatggccagtcagagacccgcattgccgcatccccaaacctcacttgggactatgataacgactgtcacaatgtgggcagaggggcacagggaccttggctcattgccaggggccaggtgtcccactagcctcctctgtgtgacacctgtggttttcttttcctgtctttttgtctcgctgatggagttgctcaagcctgtaagtaccagtaagcggttgtatttctttctcctcgggcctgttccttcatataactcatttggaaacccccaagttacagtacattctggaagaggtcaccccagatgcagtctttcccattccaggatcacataccaccaggatccccttgggaatcctggatacttgggtagcagaggaagtggcggggcccacacccaggtttaagggctctcctagtgaaattctctctcttaatttttgggtgttcaagagaaactgctctgttttgctaagggcttctggaggtggcaaggcagcctggattgggctgagatcgtgtttctaagctggtgccagcttccgcccagcccgtggaaatatgctaggtggtgggtgagtctcaactctgtgtgttgaccctcgcagcattattttcaggaggcttttggactttgacaatgcagccatatgtgctgcggggagtactttcataactggttaagatgtcctgagcataggagggtggagtggtacctgcttgccactcacgtcatctctgatatttaatgtaccctggagctctctctgcagttctttgtctttccttcttctgtgtccctcttgcctactgtgatattcattctttattcttctgttgtcttcctttaaacattttaacatcagcctactttgtactgcccactgattgaagatggaaaattctccgaatatgcccattctttttttcttttctttttttttttttttttgagacagagtctcgctctgtagcccaggcttgagtgcagcggtacaatctcgccttgctgcaacctccgcctctcgggttcaagcgattctcctgcctcagcctcccgagtagctgggattacaggcgcatgccaccatgcccagctaacttttttgtatttttaatagagacggggtttcgccatgatggccaggctggtctcgaactcctgacctcaggtgatctgcctgccattagcttcccaaagtgctgggattacaggcatgagccactgcacctggcccaaatatgcacattctttgtgataccatttcaatgtcagagtctgaacagcaatgcatgtcgaagcctggactgaaatgcccttcacacaaactgctgagtccagggtcagacactgtccttccagacccgagccctctgccaaagaacacagtgagtggtgagaacgcagctctgttgtacaacccttcctcctccctcttgaaatcacacccacacgtctgttcttcccatgactccactctccccacgtcatgattctggtgagatgagtgttcattgtccctgggctgtgagcaggtgagtgctgcggagctctgcagtcacacagcacggctgcttctctgttttcacatagccttttggtttacctgaagttaataattatcttgtttttttctttccttgggtttttttttttttaatggggtctcactgtgttgcctaggctggtctcaaacttctggcctcaagcaatcctcctgcctcaacctcccgagtagctgggactactgtctgccaccatgcctggctcacttccctaagtttttaatctatcttttttttttttttttgagatggagtctcgctctgttgcccagcctggagtgcagtggcgcgatctcagctcactgcaagctccacctcctgggttcacgccattctcctgcctcagcctcccaagtagctggggctacaggcacccaccatcacgcctggctaatttttttgtatttttagtagagacggggtttcaccgtgttagccaggatggtctctatctcctgacctcaagatctgcctgcctcggcctcccaagtgctgggattacaggcgtgagccaccgcgctcggccatttttaatctatcttaaagattcatccccagaattctcctctgttatctaaactcaggttctcacttgtgtgtctttggacatccctccagaccctttctgcctgctttggtttgtgcctgatatgtcccgtgttcattgtcaccaacatcctgagattctctgcatctttcttgaattgaatctcctcttttccagatcatccatcttcttcttacttggtttactcccttgttttggtggagagcatcctttagtagctttctaggaagggagacacaaaacataaattttttagagactttgcataaatgcttttagattatcttcacacttgatcaatagtttgggtatacattttgaagacatttctacttctagtttctagtgtagagacgtccactctattctgatttcttattctttatatatgactcctttccttttctctctctctctctctctctctctggaagcttataggatcttcctttgttgccggtgtttggaagtttcctgatgttgtgccttggtgtggttctattattatgcttgtcattcagtggacacttccagtgtgtagcctcatgtcccttacccctgggaaattctcttgactttttcgttgttctcttgtgctgcgtgttctctgtcttcttttaagaacctctgtgactcgtatgttgaacctcctgaattggttgagtaattttataaaatatatttttcttttttttttattatacttaaagttctgggttacatgtgcggaatgtgcagttttgttacataagtgtacatgtgccatggtggtttgctgcacccatcaacctgtcacctacattaggtatttctcctattgttatccctcccctagccccccaccccccacaggccccagtgtgtgatgttctcttccctgtatccatgcgttctcattgttcagctcccacttaggagtgagaacatgcagtgtttggttttctgatcttgtgatagtttgctgagaatgatggtttccagcttcatccctgtccctgcaaaggacatgaactcatccttttttatggctgcatagtattccatggtgtatatgtgccacattttcttaatccagtctatcattgatggacatttgggttggttccaagtctttactattgtgagtagtgccacagtaaacatacatgtgcatgtgtctttattgtagaatgatttataatcctttgggtatatgccaagtaatgggaatgctgggtcaaatggtatttctggttctagatccttgaggaatcaccacactgtcttccatgatggttgaactaatttacattcccaccaacagtataaaagcattcctgtttttccacatcctctccagcgtctgttgtttcctgactttttaatgatcgccattctaactggcatgagatggtatcccattgtggttttgatttgcatttctctaatgaccagtgatgatgagcattttttcatatgtctattggctacataaatgccttcttttgagaagtgtctgttcatgtcctttgcccactttttgatggggttgtttgcttttttcctgtaaatttgtttaagttctttgtagattttggatattagccctttgccagatgaatagattgcaaaaatgttctaccattctgtaggctgttcattatgatgatagtttcttttgctgcgcagaagctctttagtttaattagattctatttgtcaattttgacttttgttgccattgcttttggtgttttagacatgaagtctttgcccatgcttgtgtcctgaatggtattgccctggttttcttctaggatttttatggtcctaggtcttgtgtttaagtctttgatccatcttgagtctatttttgtgtaaggtgtaaggaaggggtccagtttcagttttctgcatatggctagccagttttcccaacaccatttattaaatagagaatcttttccccattgcttgtgtgtgtcaggtttgtcaaagataagatggcggtagatgtgtggcgttatttctgaggcctgtgttctgttccattggtctatatatctgttttggtaccagtgccatgctgttttggttaccgtagccttgtagtaaagtttgaagtcaggtagcgtgatgcctccagctttgttcttcttccccaagattgtcttggctatgtgggctcatttttggttccatatgaagtttaaagtagttttctccaattctgtgaaaaaagtcagtggtagcttgatggggataggtttgactctataaattactttgggcagtaagaccattttcacgatatcgattcttctgatccatgagcatggaatgtttttccatttgtttgtgtcctctcttattttcttgagcagtggtttgtagttctccttgaagaggtccttcacatcccttgtaagttgtattcctaggtattttattctcttagtagcaattgtgaatgggagttcactcatgattggactctgtttgtctgttattggtgtataggaatgcttgtgatttttacacattgattttatatcctgagactttgctgaagttgcttatcagcttaaggaaattttgggctgagatgatggggttttctaaatatgcaatcatgtcatctgcaaacaggggcaatttgacttcctctcttcctatttgaatacctttattgctttctcttgcctgattgccctggccagatactgccctttctcttgcctgattgccctgcctttccaatactatgtcaaataggagtggtgagagagggcatccttgtcttgtgccagttttcaaagggaatgcttccagtttttgcccattcagcatgatattggctgtgggtttgtcataaatacctattatgttgagttacattccatcgatacctagtttattgagagtttttagcatgaaaggctgttgaattttgtcgaaggccttttctgcatctgttgagatagtcatgtggtttttgttgttggttctgtttatgtgatggattacatttattgatttgcgtatgttgaaccagcctttcatcccagggatgaagccgacttgatcatggtggataagctttttgatgtgctgctggattcggtttgccagtattttattgaggatttttgcattgatgttcatcagggaaattggcctaaaattctttttttgttgtgactctgccaggctttggtgtcaggatgatgctggcctcataaaatgagttaggaaggattccctctttttctgttgattggaatagtttcagaaggaatggtaccagctgctctttctacctctggtagaattcggctgtgaatctgtctgttcctggaattttttttggttggcaggctattacagcctcaatttcagaacctgttactggtctattcagagattcgacttcttcctggtttagtcttgggagggtgtatgtgtccaggagtttatccatttcttctagattttctagtttatttgcataggtgtttatagtattctctgatggtagtttgtatttctgtgggatcagtggtgatatcccctttatcattttttattgtgtctatttgattcttctctcttttcttctttattagtcttgctagtggtttatctattttgttgatcttttcaaaaaaccagctcctagattcattgatttttttgaagggttttctgtgtcactatctccttcagttctgctctgatcttagttatttcttgtcttctgccagcttttgaatttgtttgctcttgcttctctagttctcttaattgtgatgttagggtgtcagttttagatctctcctgctttcccttgtgggcatttagtgctataatgtgtcccagagattctgatgctttgtgtctttgttctcattggtttcaaagaacatctttatttctgccttcatttcattatgtatccagtagtcattcaggagcaggttgttcagcttccatgtagttgtgcggttttgagtgagattcttaatcctgagttctaatttgattgcactctggtctgagagacagtttgttgtgatttctgttattttacatttgctgaggagtgttttacttccaattatgtggtcaattttagaataagtgtgatgtggtgctgagaagaatgtatattctgttgatttggtgtggagagttctgtagatgtctattaggtctgcttggtccagagctgagttcaagtcccggatatccttgttaattttctgtctcgttgatctgtctaatatagacagtggggtgttaaagtctcccatttattattgtgtgggagtctagatctctttgtaggtctcttaagaacttgctttatgaatctagttagctcttcttgttgaattgataacctttactattatgtaatggccttctttatgtcttttgatctttgttggtttaaagtctgttttagcagaggccaggattgcaacccctgcttttttttttgctttccatttgcttagtagatcttcctccatccctttattttgggcctatgtgtgtctttgcacgtgagatgggtctcctgaatacagcacactgatgggtcttgactctttatccaatttgccagtctgtgtcttttaattgggggcatttaggccatttacatttaaggttaatattgtatgtgtgaatttgatcctgtcattatgatgctagctggttattttgcccattaattgatgtagtttcttcatagtgtcaatggtctttacaatttggcatgtttttgcagtggctggtaccgattgttcctatccatgtttagtacttccttcaggagctcttggaaggcaggcctggtggtgacaaaatctctcagcatttgtttgtctgtaagggattttatttcttctttacttatgaagcttaatttggctggatatgaaattctgggttgaaaattcttttcaagaatgttgaatattggcccccactctcttctggcttatagtttctgcagagagatccactgttagtctgctgggcttccctttgtgggtaacctgacctttctctctgggtgcccttaacatttttgctttcatttcaaccttgtgaatctgacaattgtgtgtcttggggttgctcttctcgaaagtatctttgtagtgttctctgtatttcctgaatttgaatgttggcctgccttgctaggttggggaagttctcctggataatatcctgaagaatgttttctaacttggcaccattctccccgttgctttcaggtacaccaatcaaacatagatttggtcttttcacatagtcccatatttcttggaggctttgttcatttctttttactcttttttctctaatcttgtcttatcactttatttcattaatttgaccttcaatcactgatatcctttcttccacttgatcgaattggctgttgaagcttgtgcatgcatcacgaagttcccgtactgtggttttcagctccatcaggtcatttaagctcttctctacactggttattctagttagccattcatctgaccttttttcaaggtttttagcttccttacgatgggttagaacatgcttcttcagctcagagaagtttgttattactgaccttctgaagcttacttctgtcaactcatcaaactcattctccatccagttttgttctgttgctggcgaggagttgtgttcctttggaggagaagagacgttctggtttttggaattttcagcctttttgctctggtttctccccatctttgtggttttatctacctttggtctttgatgttggtgagctacagatgaggttttggtgtagatgtcctttttgttgatgttgatgctattcctttctgtttggtagttttccttctaacagacaggcccctcagctgcagctctgttggagtttgctggaggtccaccccacaccctgtttccctgggcagaggctgcagaacagcaaatattgctgcctgatccttcctctggaagcttcatcccagagggacacccacctgtatgaggtgtctgtcggcccctactgggagatgtctcccagtcaggctacacatgagtcagagacccacttgaggaggcagtctgtccattatcagagctcaggtgctgtgctgggagaaccactgctctcttcatagctgtcaggcagggacgtttaagtctggagaagctgtctgctgcctttgggtcagatatgccatgcccccagaggtggaatctggagaggcagtaggccttgctgagctgcggtgggctccacccagtttgagcttccccgctgctttgtttacactgtgagcatagaaccgcctactcaacctcagcaatggtggacacccctccccacaccaagctcccgcatcccaggtcgatctcagactgctgtgctagcatcgagcaaggatctgtgggcgtgggacccgccgagccaggcacaggagggaatctcctggtctgctggttgtgaagactgggaaaagcgcagtatttgggcaggagtatactgctcctccaggtacagtcagtcatggcttcccttggctaggaaagggaaacctttccccttgtgcttcccaggtggggcgacactccaccctgcttcagctcaccctccacgggctgcacccactgtccaaccagtcccagtgagatgaaccaggtacctcagttggaaatgcagaaatcacccatcttctgcattgatcttgctgagagctatagactggagctgttcctatttggccatcttgaaagtgcctgctctttttttaatctctttgtctttttgctttacttttttttttctttttttttgtttttttgaaatggagtctcgctcttttgcccaggctggagtgcagtggtgcgatgtcggctcactgcagcttctgcctcctgggttcaagtgattctcctgcctcagtctgggattacaggtgcctgccaccacacctgactgatttttgtatttttagtagagacagggtttcactatattggccaggctggtctcaaactcctgacctcaagtgatctgcctgcctcggcctcccaaaaggctgggattataggtgtgagccaccacacccagcctgctttactttttggaatgattttacaattttgtcctctactcattttattgtgttttttatttctaatatcacgtttttaatttgcaagggttttccttttgttctcttttctcttttctttttctgacagtgtcctgtcctcgtttcacatatatggtagtttctctcatttctctaaggagactaatgatttttgtgggggagttttcttctccctacactgtttctttttttgcagggtgcattactcggtttttaaggctggaggctttccttagatgtcatgcagtccttgattgtctgcctgtatttcaacgtagaggcccagtgagccggtgagggtctctgagtgtgccaagcctgtgggctgtgggtctctctggggagcgagctgctgtgagtacagggacctctgaattccgtccagatgcccaagggaaggcttctcctgtctctggcccctggggctaaagacctgcctgtgtcctgggagctgagtgggaggcacaggctgggtctcactgtcctgtgtgtgcttagcctccttcttttcagttcagcacctctgtttgcagctaggcctacagccccgagtcctgagagttctgctttatcctctccagagaatcagcccctggccttcctcgggttggggtgagtggccgtctggtgtggagtagtgtaaggtgatgcagaggttcccccctctgccacattgctgcagccagggagcctgcccctaattcctaagctttctgaaggttgttctctgcagatagggtcaggcctcccgcggctggctcagggtcaactgtcttggggctgttaccagtttgtccatctgttttttagcttccaacattctgttctggaatattgtctctaaaacatagcttttttgaaatatgattcatgtacccttttttcaagtgtacaattcagtgatttttagtgtattcacagagtttgcaaccacacaagtaagtgcatacccattagcggtcaccctccattttcctccctccacatcctttggtagccagctgtctgctttcagtctctatgggtttgcctgttcaggacatttcatatcgatgggctcatacggtgggtgggccttggtgacgctggtttcactgcacagtgtttccaaggctcatctctgccatatcataaactagcacagcatgccttttcatgactgacttatattccattgcgtgcatggagtgcatttcatgtacccattcatcagctgataacagttggatcttgtggcttttgcatttgaaaatccatttacagggccgggcgcagtggctcacgcctataatcccagcagtttgggaagccgaggcaggcggttcacctgaggtcaggagttcgagaccagcctggacaacaatggtgaaaccctgtctctactaaaaatacagaaattagctgggtgtggtggtggatgcctgtagtcccagctactcaggaggctgaggcaggagaatctcttgaacctgggaggcggatgttgcagtcagctgagatcacaccactgtactccagcctgagtaacaagagcgaaactccatctcaaaaaaaaaagaaaaaagaaaaaacgcgtttacaggaatgaggctttaggaaggagcgcagtttgccatgtgtgtaacccaccatctttatcctggagtccccgccatgtctgtgccttgtgacttctctgtgactgccactggccttacccatgttggggttgggctggatctagaggaaagcagtttcaaatttcttctcctctcagcagaggtgactgtggacaagtcctatctggtcttgttttctcatccataaaataaagatagtaaagtacactagtgattcctgagcttggctggggcccctcagatactctcagggggacctgggtggcagggttgtggcagcacaggtacaggccctcatgtctcataaaccaagcagaacagaacaggcagcagttgtacagctgagccttgggctgtgcagcccctgctatctctgtcaaggaagaactaaaagaatagctcaactgaggaaacaaacacctttttcttcacattcttcttttaactatcttacagattactgcagtttttaaatcctgatcctttgagagctgacggaatctctgatctccagcaggtattacaggccctaaaaaaagtaaaataaaaagagagaaaaaactgtttattctttaaatccttctccttcctccctccagacttgagattagaagagaaactccttagatgggggacttaacctgaagacatccttttagaaacgatcgaatggattgttgcttctgagaaattgttccttgttttttggataataaacgatcttccttttggtagtttggtggttttttttttctttttttttaagtaagcatatatacccaggtgtttacattgaaatctatattttcttcatttctgtgaagttcttgatctcctgtgctgacgcctcagggcagacactggttgtctaatgcacacgttctctcagttgcagaagctgaagggcctgcagccgcccgtggtagtgctccggaacaagatcaagccctgcttaaccattgactcgtcgccgctgtcagcagacctgaagaaggtaaaagtgctcgtaaaactgaatttatcaagaatgccaactttttctaatagagaaggattttgaaataaatggctctaaggttgcattgtataatttctttgcttttgaaattctctttttatttgagattacaggcatgagccaccacactcggcctaatttctcatttattcttaaatccaagttagcttcttagaagtgagtgagtgattgttttgtgaggcagccgctgtgtaactgtgagccccttctgcagtcaggtttccaggatgcctgtggacagggctgtgggaggagcagcaggccaccagggcaattgtaatgcactccccgaccgttcttttcaaaattgtcttacacacatatggtttcatttggaaaattgatcatacgtgtttatctacttttttcctgattaaaaaaagttaaaaaaaaattttttttaagataggaagctaaaacaaccaggacaaatagcatgagagagaagtggacagattccacagtcttagaagatgaaagcaggagacagagtgtggctgcctcttcagggaaggagtgctttgcgagcgaggggagcgtgaaccaccagctctgtcttctgagcacccacagccagcttgtattgttctcagcagcaaggttggaggctctttttggagaaatttgaatggctctagagaaatgaccttcagatgatgctatttggaattctcccatgaacagggcctgcttgcctccctgcctttctgcagtgaggtgacactcatgtgatgacaagagtccccagagcctccagttgggcgttagtgtcttgctgtccaccatgaacagacatcagggatcatggacatttgaagaaagccttcaccttaaaaaaaaaaaaaaagaccaggctgggtgcattggctcacacctgtaatcctaacactgggaggccgaggcaggcagataacctgaggtcaagagtttgagaccagcctggccaacatggtgaaaccccgtctctactaaaaatacaaaaattcgccaggcatggtggtacatgcctgtagtcccagctacttgggaggctgaggcaggagaatcacttgaacctaggaggcagaggttgcagtgagctgagattgtgccactgaactccagcctgggcaatagagcaagactccgtctcaaaaaaaaaaagaccgaaacaaactctcaaggaaacaaacaatgcagtgaggaggagaaaatgttaaagaataaatatccccagagagaataaatatccccggagagaagacattgcatctctaacagcttactgttaaagggatgtaatgttttttctctctggggatattgaaaataggatattttaaaaaggaacaggcagaataaaagattcttggaaattcaaaatatagaaaaatgtaaaaatcactagtatgtttgagacataaaagagaagctaactcagaaagtagaggaaaaaggcaaagagacggaaataggaggaaaaatttttgagggtcagtttgaggtccggtttctgaaaaatgggatttctaggaagaatgaaggaagatgataggacattttctgaagattaacataggaacattttctggacctaatggacaagaatttccagattaagagggcctacccatcacaggcccagcacaactgctgaagaaagagattctgaagcatctaagttgagggaatctaaagattatgaaggcttcaagagagatgaaactggtcctacacactggaccaggaatcagaatggcttcagatgtctccacagtgcaccaaatgagcattgatgtcaaaattctgatgaggtcaggtgcggtggctcacgcctttaatcctagcactttgggaggctgaggcgcagattgcctgagctcaggagttcaagaccagcgtgggcaacatggtgaaatcctgtctctactaaaatacaaaaaattagctgggtgtggtggcatgtgcctatagtcccagtcgcttggtaggctgagacatgaaaatctcttgaacctgggaggcggaggttgcagtgagccaagatcgtgccactgcactccagcctgggcacagaacgagactctgtctacaataataataataataataataataattctgatgaaaagctctttccaaccagaggtccttactcaaactgtggatggagcgtgagggtagagtgaagacatttgcagacatacagagtcttaaaaaaacgtacttcccttccaacctttgtcaagaagatattaaaatatgttctctaccaaaacaaagaagtaacccgagaaagatgaccacatgggtttgcagacaaaaggtgatggtgaaggatgataccaggatagttgctcaataccaagtgcagagcatggcgggtcctgactgcagctagggctcaggactcgagaggacctcacagagctcatggtgccgatgagctcggccatttggaagatcctatccatgtgggtggagaactctattggaacatttgggttttagtgacagttacatagaaaaataagcaaataaaagtctatcttttaaaaagctttacaagtgaagctgatggactggcagtttattaggagaatgaggaggaaaagccacatctttgatccagtgaactttaagttcctgtcaatgggccatctattggatccttttaatttagaaaattaaagcaagaatcttttttttttttttttttgagtcggagttttgctcttgttgcccaggctggagtgcaatggcatgatctcggctcaccacaacctgtgcctcccgggttcaagtcattctcctgcctcagcctcctatgtagctaggattacaggtgcctgacaccacgcccggctaattttctatttttagtagagacggggtttctgcatcttggtcaggctggtcttgaactcccgacctcaggtgatctgctcgccttgacctcctaaagtgcagggattacagacatgagccactgtgcctggctttttttttttttttttttttttttttttttgagatggagtctcgctctgtcacccaggctggagtgcagtggcacagtcttggcttaccgcatcctctgcctcctgtgttcaagtgattctcctgccgcagcctccagagtagctgggattataggcatgcaccaccacacctggctaattttgtatttttggtagagatggggtttcaccatgttggccaggctggtctcggactcctgacctcaggtgatccacccacctcggcctcccaaagtgctgggattacaggcatgagccaccgtgccctgcctagcaagaatcttttaatgggagtcttaataggagaaaaagcaacagtcttttaataggaggttggtactgagaaaagatttggggaaacttaacaagttagggcttggaaaatactgggtttggcaatgtgtagtgctttttggggtgaaatgagccatgcaatggagtttttgttagttttctctaccttattttggtttctggttgtttctgttttgtaggctcttcaaagaaataagtttccgggccccagccacactgaatcttactcttggcctcccatagcgcgtggctgtgatgtggttgtcatttctcactgtgaaagcaaccctttgctctacctcctaccagtgttgacagttttgcaaacaggagcctgctacaagtcattaccaagtagaaatggagtaagtcaaagacagttttgcctcacaaccaaatgggttaaatatttattttaaaattatacacctcacctttgaggaaggtcgtctattactcagtttggttttcaaacttccaggccagaaactgtcctgtgggaaagtgtcctttcccattccaattactgatgctctcatactgattctcacctggagcctatagttgtgggccattggctgaggcttttagaaatggatatggaggccaggcacggtggctcacgcctgtaatcccagcactttgggaggccgaggcgagtggatcatctgaggtcaggagttcgagaccagcctggccaacatggtgaaaccctgtctctactaaaaacagaaaaattaggtgggcatggtggcatgcctgtaatcccagctacttgggaggctgaggcaggagaatcacttgaacctgggaggcgaaggttgcagtgagccgagattataccattgtgttccagcctggacaataagagcaaaactccatctcagaaaaaaaaaaaaaaaaagaaagaaaaagaaaaaatggatatcgagtgtgtaaaatgctgtcacagacctgagtctatctatccatcacagtagcagcatgagatgggcattgttctgaccatttcacggaggagaaaatgaggctcaggaagagttactggggtaaatttcccactgacagggctaggagtggggttgaagtctgagcttctgctgccttgtcccgtgctctgccagtcatttcctagctccccaccctgcttcataatccttcttaacttttcccatgtgggaaaacctcagaataactgtattaagtctgttctagcattgctataaatacctgaggctgggtaatttataaagaagagaggcttaactggctcatggttctgcaggctggagcggaagcatgatgctggcatctgctcggcttctgcggaagcctcaggaaactcacaatcattgcagaagtctaagggggagcaagtgtgacacatggctggagcaggagcaggagcaggggaggtgccacatacctttaaacactagatctcagaagaacagcaccaagaggacagtgctaacccattcatgagaaactgcccccatgagccaatcaccccccaccagcccccacctccaacactggggattacatttaacatgagatttgggtggggatgcagagctaaaccatttcactgagaaagaggtggtgggaaagagaggagcggtgtgaaggtaaatgatgcagggcatggccctgtgctgctggtttgtggctgttaggggcctgatgggtgtggaacctgcatctcggggcctggcactgagggtgctccagacggggctccaccagtgaaaaacagcagtaagaagacatagggttgcagttaggaaaaatactagctcatttttctaaccgtgccatgcagttttatgatttccctttagaaagttgcatctgttggccgggcgcagtggctcatgcctgtaatccagcactttgggacgccgaggcaggcggatcacgagatcgagatcgagactatcctggccaacatggtgaaaccctgtctctactaaaaatacaaaaattagctgggcgtggtggcacacgcctgtagttccagctactcgagaggctgaggcaggagaatcgcttgaacctgggaggcggaggttgcggtgaggcaagatcgcaccattgcactccagcctgggcaagaagagccaaactccatctcaaaaaaaaaaaaaagttgcatctgttattagcagctgatttagtcaaattaatggatatgtttctatctcccaaattacttagcagcagactaatgagaagcaactgatgagaagtcgcttatattgaggccgaacccaggctcagggcagaaggggatgtccaggtctcgtccctgtggcccccagctttctccacgcctccatggtcagcctgctttcaggcctgtgtctggaagctgggcccacctggatctgtatgaatgaaagaggagcctcagcttgtcttcagttactggagggtgtgtgtctggcaggcagtgcagcttcaggagttacctgtcggcttgcagagggcagggttcagaagatagtgtcctaaggaagagaggttcgtctttttttttttttttttgagatggagtctcgctctgtcacccaggctggagtgcagtggctccatctcggctcactgcaacctctgcctcccgggttcaagcaattctcctgtctcagcctcctgagtagctgggactacaggcacacactaccacgcctggctaatttttgtatttttagtagagatggggtttcaccatattggtcaggctggtctcacactcctgacctcgggtgatccacctgactcagcctcccaaagtgctaggattacaggcgtgagccactacacccagccagggttcgtcttttttaaggcccctttcaggaggcatttagttcattcttgtgcttaggatctgtgcaggggatgtggagccagactgcctgggttcaagtcctgttgctaccatgtattagctgtgcagccttgggtaactgacttcacctctctgtacctcaagttcctcacctctgaagtgaagcagtgacagcctctgccccataagagcatcttaagagctaaatgaatgcatacgtgtgaagtgcttcattgagactcagcaaatatgactcaatgtgtctaaatctgttttaatgaaattatatcgtcacttttctgacctgtatgatgattatagcagaaacttacggggtgctgcttctgtgcaaggagatgttcttgatgtttcatatggatgctgaattcctaactactgtctggagtcatttgaatttgtctgtcttcgcagcctctcgcagtcatcgtgtgccctgggtggaagaaggcccaatttatttttgaattattgggagaatatagcatgtcctccaggcctcttcatcctgtgctattaacaattgggctccataaagaggaagccaaaaatacaaagcttccaaggggctgtaagtatccttttcaagcggctataaaagttaaagtatccttttcactgtcttccctacagaagacagtggagcctggctgggcctgggtccacagtgacatggcttgtgtgatgacacactcacagtcactagtccagacctacttgtcagctcccgacggttttgattacgaaggcttgatcttgacttacgtctgcttcactgagaaaactatgtcacttcattcatttatcatctatttactgaacacttaaactgtttgttagatgctgggcatatggggttgactaggacagaaacagtgttttacttcattagaaggcatttctagaaagtatgtggactcttagcagaggaaatcttagaaaaacctgtggaaaattgaaaatgttcacttttttttttaaatgcaggtgatgtgattgttacgaccccatacagcctgctgaggcttctcgcctgtcagagcctgctgttcctcaggctctgccacctgatcctggatgaggtagaggtgctattcttggaagccaatgaacaggtgagcgtggcttaaggtcctcagcactcagaagagaggcgtgattaacatgctaactgatggcaggaaggaggaaaagtgtctggttggggaatacattggttaatctaaaaaaattttatgctttaacttctataattaagaagaaagaatggttatgtgaaatttccttcccagtgttagaattctttctgaagtgcaaacattctttcctagagatttcctaaaatacttaaaatttttctgattacagaagtaatgatttttattttagaaaatttaagacatggagaagagcacttgaaaaacccagcctgcacagccatagtttcagaagggatccctcttactattttggagtatttgcttctttttctttgaattcttgtgtttgtagatacatatagttaataacatcaggggtgtgttttacaggccattttgtagcctgcattgtgcagggcgcagcagcgtaagggccaccgcttcctgttccacagcctggtggttactggccatatagtattcagttctttggacatcacagaatttgttttacaactgtcttaatattggatattcaacataatttgtatacgtgtgtggctacagaacatgcatgctttttgcacctgtttcctttaggatgaattcctaggaagggattcatgggtcagaggctttgagctcttgtaaggcttttcttggaagcagtgtcacacagtcaccaagggtatgcacttgggagtaatgatggccccagttttgagtccaggctttgttactgactatgaggcggtgcagggttcttgaactcctctgaagtctcaggttctgatttttgtaaaactagtatctaggcatactgctctgtgcagcatcctttctgaaagcatgacctgatgtgcactcctgtcagccatgtgcaggctctccacacccctgccagagcaggcttgccccagttttctcctccagcctaactggccaacagtgggatcttgtcagcctaatttacatttccttgattattttttaggttgaacattaattcgtattgatcatttgtattcactctgagttgcttgttcacttccttttcttattttctgttggtaggatcatcttctgctaatcagtttttagaagtttttatgcaagaacattaatctcttgtttgtttgttatacatatttaccaagatattgcttatgctttagttttgtttataatggagattgtaggatatttattgactttaaacttgacattttctcctatttagtttttgcctttttttttttttttttttttttgagactgagtcccaccctcgtcgcccaggctggagtgcaatggcttgatcttggctcactgtaacctccacctcccgggttcaggcaattcttgtgcctcagcctcccgagtagctgggattacaggtgcacaccaccacacccagctaatttgttgtatctttagtagagatggggtttcaccatgttggccaggctggtcttgaattcctgacctcatgatccgcctgcctcagcctcccaaagtgctgggattacagacgtgagccaccacacctggccttttccttttatttttgaaagactttctccactctgagaacagaaaatatacaaacccttacattttatgttctgccacactagttcttactcttttgaaataaaaatgaaattaattatgctaatttttcagatgtttgctatattagataactttaaaaaaaatattgaagttgaagaaagggaatctgcaccacatcagattgttgcagttggagttcattggaacaaacatatagaacatctcatcaaagagttcatgaatgatccctacattgtgatcacagccatggaagaggctgctctctatggcaatgtccaacaggtaactttgtgtgtatgtgtatgtgtatgtgtgtgtgtgtgtgtatgtgttggtggggggctgatgaacacaagcaagtaacttttatttcatggcttagtattaaacaattacagctttgatttcatatataaattatgaatgaaatacaattatagttgaatatttaaatttatattgatttcctatacattcttttctattaaaatcccaacacctgtggaaagtggatctggagcacctaaaatattaaaaagtcacattgtttctgtgcttcattaccaggtagtacatctttgcctagaatgtgaaaaaacttcttctttactccaagctcttgattttattccaagtcaggcacaaaagaccttgatcttcacctgctctgtagctgaaacagaaatagtgtgtaaggtgagtccatctccatataaaaaatgttctgtttgtttcaactggtcgaatctcaagtcatcacaaaattactggggtggttgactctgtggcagggaagtaaagttttacaagtttaacatcaatcagaagaggaggtggggtcttctcacagagcatgcaggctgaggcctggatctggggaggagccaggtgcgggggcagggcttttcctctgcagcagcgttccccagggcagggcagtttcgtcttggtggagtattaaaagtatcaatttatagacatgacaacatcttctgtaccctctgtttaagaagattgaggtggctcatgcctgaatcctagccctttgggaggccaaggtaggaagattgctggaagccaggagttcaagaccagcctgggcaacatagtgaaaccctgtctctacgaaaaaaaaaaaaaagaagaagaaaaagaagattgagaagataacagtaaaagatatcatatagccaaaaaatcaaataaattggctaaagatttattcagttttattttgtacatattagtgctaaaacgtagaaatgaagccaactaccaaataaaagaattaatagtacatctagctttctgcagcagtcagctagaagtatagttatatggtactgtagtcaaccaggactttctagctgatgtgtctgtgtgtgtgtgtatgtgtgtttatacacacacacaagtatggctgtgttattttaaaaggaagcaaaatagtttcagcaaaatactgcttatttcacttgagcaagattttagacataaacaaccgaattttggaaatatatttcagtttataatcatctcattcttaagaattatgggatcagtgaggtagtgccctcacagataaattaaagtgctttacattgacaattattgatggaacggttggcttccagcctatatccctgactgtgacctggcctctttgatttcatctttaggtagtagaaagcagttcaatattttgcttgaagatgcataaagaaatgatttttaacttacaaaatgttttagaacagtggaagaagaagttaagttctggctctcaaattatattaggtaagtgttttaatttctacttctatttagtgaaggttgagctactaggaattctatctttaattcatttatatatctcatctccagatttctcattattccccaggtttactgagactttattagcaatgttaatttcaaaatgaaaaattaacctccactaagattttgatgttgaggtaaatctctcaggtcagtgggcagccaccattagtctagacattctccctagagttatagcttgaggatcactatcatatatatgatatatattatcatatatatatatgataatatatatcatatatatgatagtgatatatatgatagtgatcatatatatgatagtgatcatatatatgatagtgatatatatgatagtgatcatatatatgatcatatatatcatgatagtgatcctcaagctatatatatattcatgtatatgactatatacatatgactatatatagtcatgcatgattgctaaatttaatattaaaaatataaaagtcaaaatatatagaataagtgaaaaacatatgggccgcttggatttgtaataagagacatttttcaggctaagaaggagaccacttttctctggaatttaagcactgggctgtggcattttggggaaaaaaatggggaagaagtttctttgcatccaaaaaagtaaaatgtgatatggaaatgcactgcagtgtggccgtgggaactgccggttaaagtaagtgcggtaactccagcgcgtgtgacattgtcggactccctctctgcagccctcacagacgactgcgtcccactcttggccatcaccgatgccacgtgtgtgattcacttcagtttccctgcctcaccaaaagtttttggtggacgcctgtattgcatgtctgatcattttcacgctgaacaggtttggtgaatttttattctcttccatattccactggcatcttctgtgtcatgataagctcagagtccacaaggtttcctcagtcagactgggatagatgatccacttcctttattcacccccaattttcagggttctcctgcagaacagggagataagaaagccaaatctgtcttgctgctgacggagaaagatgcgagccatgcggtgggcgtcctgcgctacttggagcgagcggacgccaaggtccccgcagagctgtacgagttcaccgcaggagttctggaagccaaagaagataagaaagccggaaggcctctttgtccatatctgaaggcttttggtttttgcaagtgagccagtaatttgtttcttattaaactgatgtataacctgcagtaaggtgcacagctgttgcaatgtggtgaattgtcatgtatctagaagccaccacccactctgagggagcagtctgggggttccctcgcactcttccccacgtgccctcccctctgcagggctgtcagtgttgattaactttgcatgattttgaactccatagaaatggcatcgtggtatgttctctttcgtgtctggcttctttctctcagcctcatgtctgtgacattcgtctgtgttgttgtgtgtatctatggtttgttttatagctcagtgttctgttgtatggctgtatcacagtgtgtgtatccattctcctattgatgggcctgtgggtggtttccactatcaggctatgatgtttgaagctgttaggaacactcttggccatgtcttttgtggaaatgtgtacgcatttctcttgggtagacgctccagagggcaagtggcaggtcatggggtaggcatgcgtttaactcttccaaagcggctggccattttccggtctggtcagtactgtctgacagagcctgagttgtccccaaccctcaccagcgcttagtgttggtggaggtggagtggtaaaccattgtgatgttaatatgcatttccctaatgattaatgatgttgaatatcttttcataggcttgtgggacagttggccatcctctttttgtgaagtgcccgttgaggtcttttgaccagtttttacagggagtgtttatctttttcttcttggtttgtcggggggagtagcttatatatactcaacataagtactttgtgtgatgtgtgcactgagaatgtctcctccaagctgtggcttgcattttcactcttttaatactctgctgatgatgaacaggcatttttaattttgatgaagttttttttgttttttgagatggagtttcactctgttgcccaggctggagtgcagtggcgccatctcggctcactgcaagctccacctcccaggttcacgccattctcttgcctcagcctcccgagtagctgggactacaggcacctgccaccatgcccagctaattttttgtatttttagtagatatggggtttcaccatgttagccaggatggttttgatctcctgacctcgtgatctgcccgcctcggcctcccaaagtgctgagattacaggcgtgagccaccgcgcccagcctgatgactttgtgtgcttataggaaatatttgcctatcttggccaggtgcagtggctcacacctgtaatcccagcacttcgggaggccgaggcaggcagatcacaaggtcaagagatcgagaccatcctggccaacatggtgaaaccccgtctctactaaaaaatacaaaaattagctgggcgtggtggtgcgtgcctggagtcccagctacttgggaggctgaggcaggagaatcacttgaaccctggaggcagaggttgcagtgagctgagatcatgccactgcactccagcctggagacacagcaagattctgtctcaaaaaaaaaaaaaaaaattagctgggtgtggtggcacacacctgtaatcagttacataggaggctgaggcaggagaatcaattgaacctgggaagcggaggttgcagtaagccaagttcgcgccactgcactccagacggggtgacagagtgagagattgtgccactgaattccagcctggacaacagagcgagattccatctcaaaaaaaaaaaagttgtctatttcaaggtcatgaaggcattctcctatatttctagaagctttgtagttttagctttcacagttacacttataattcatattaaattagtttgtatgtatgaccaggtatggtggctcacacctataatcccagcgctttgggaggctgaagtgggaggatcacttgagctcaggagttcaagaccagcctgggcaacacacagagaccccgtctctttaaaatatatatatgtgtattatatatgttatatattatatatataacatatataatatatatatacacacacacacacacacacacatatatatatatataagccagctgtggtggcacatgtctgtagtcccagctactcaggagccttgggtagggggatcgcttgagcctgggaagtcaaggattcagtgagacgtgattgtgccactgcactccagcctgggtgatagaatgagaccctatgtccaaaaaaaagaaaaaagaaaaaaaaaatatgtgtgtaatatgagatctggggcaaggtttgatttttccatatggataatggtttgctccagcatcgtttatttaaaatatcattcggttctcactgcatgagtgcgtttgccatgagccaggtgatggtatttgtggtccatttttggactctattctgttactttggcctattggtctaactttataccagtattacactttgttatagcacgtcttaggagctggtgtatgagtcctccagctttggtcctcatcaaggttgtttggctattttaaatccattgcatctccacatacactttattttttttatcttttttttttttttttttttgagatggagtcttgctctgtcacccaggctggagtgcagtggcatgatctcggctcactgcaacctcctccttctgggttcaaacaattctcctgcctcagcttcctgagtaactgggactataggtgtgtgccaccatgcctggctaatttttgtatttttagtagagacggggtttcaccatgttggccaggctcatttcgaactcctgacctcagctgatccacctgcctcagcctcccaaagtgctgggattacaggcgtgagccaccgcacccggcctccacgtacattttagaatgagcctgttagtgtcttcagaaaccttgcagaattttgctagggagtgcattgattgtgttgatcagcttggagagcatgggtaccttgacagtcatggggcttctctgcctgatccagacgcaacaccactgcgtgatacacagacagctgaggctggggcatgggtgcctgatacgtagctgctggattgaatttaaagataactgttgacattaacgtttttgaattatggtacattaaatgtgttactagcagtattcctatttacgcttaaagaagaccgagtttttttttttttttttttaagacagtctctgtctggctctgtcacccaggctagagtgcaatggcgtgatctcagctcactgaaacctccgcctcccgtgttcaagcagttcttgtgcctcagcctcctgagaagctgggatcacaggcgtgaaccaccacacctggctaatttttgtatttttagtagagatggggttcgccatgttggccatgctggtctcaaacccctcacctcaagtgatccgccctcctcagcctcccacagtgctgggattacaggcatgagccaccgtccccagccaaatactgactttatttatttatttatttatttagagatggagtcttgctctgtcgcccaggctggggtgcagtggcaccatcttggctcactgcaacctctgcgtcctgggttcaagcgattctcctgcatcagcctcctgagtagctgggactataagtaggcacctgccaccatgcgcagctaatttttgtatttttagtagagacggggtttcaccatgttggccaggctggtctcgagctcctgacctcaggttatttgcctgtcttggcctcccaaagtgctgggattacaggcacgagccactgtgctcggcctcaaatactgacttttaaaacggcaatttcaactatttctcaacgtggaagcagcattgtagttaaggaacggcttctgggttagagatcgattgccctttgttgtgtattatggcaatgtatttctaattcagtctttattatggaaatacattttgttcatttacataatgcattttagaatgtctagagaaatagggtggctgagcagggaggatctcttgagcccaggagttaagaggctatggtgagacatgatcttgccactgcactccaggctgggcaacagagtgagaccaaactcttaaaaaaaaaaaaaaaaaaaaaaaaaaaaagaaagtttgctagagaaataatgaaataactcattaagtttattcagtgttaattaaaatgtaaaatccattttcacttatttgtatattattaatgtcatctgaaatatttaatgtggttattcagtctttagggtgtttggaataaaagttatctgatttaggttgcagattaattttctgaagaaagcgttaaaattcacattaacaattattacttacttatgataagtctagtcatttcattttcagagacaaaaggatctgtcctgaccgacaccgtattaatccagaaacggacttgcccaggaaactgtccagccaagccctaccttcatttggatacattaaagtaggtttggttaaagatgcttgtgtcctctgacgaatggtcatgttaataaacgtgttttatttgttaagcaggatcttagtagatgtcatggtgccttccagtgatcagtattaacataccaccattagtgcaaccagaggcacgtgtccttacaaggcgccttatttcagggccccagcgtatttataagccaagatcaaattcagtaatggatgacagtttaaggatttttttttcaattatattttcagaaaatgtttctatttgggggccattaaaaataatgcagtgactgggcacagtggctcacacctgtaatctcatcattttgggagactgaggtgagcagatcacttgaggccaggagttcaagaccagcctgggcaacatagtgagatcttgtctctacaaacagattttttaaaaaataatgatacagtgattacatgaatcttttcaagacattcatgataatttctttgaggaaaattctgtaataaggtgcagatagaattgccaagttaagaatttttttattttctttctaatccttttttattaatttattcatttctttttgagcatacaatttctctccctttcatctgtttcccttagagcagtatctgttgtgttaatttcctaggctgctgtaaaagattaccaccaagttagtgacttaaagccacacacatttcttctgacatgttcctggatgtcagggtgtcagcagggccatgcccctccacagcctccagaaggtgacctggcctgtggctcgcctggcgtccttgcatctccgccagcagccactgtcactctctctccacctgcatcttcacatgacctcctcttctctgtgccccttgtaaaggacgtttcattggagggagggcccacctagataacccagagccatctcccagtctgcagacttcactacctctgcaaagaccctgttttcaagtcaggtcaaagtcacagtgagcttgggggttaggacatggacatacctcttttgggagagtcaccacccaacccactacggttttcattattgaatttttaaaaaaatttctaactctttcctgcattctgtcacctcatttctaagttgttgtaattctgatctgttactcttttatacactcattgttttcttagttaacaaactgaaagcaacatttcttgaaggttatagttttgatctgtttgtggatgtatctttctaacaggtttcattgtctgtagggatggttcttctgctctttattctctttttaattattttatttttatatattattatacattttgttattttatgatgacttcatatcggatttgaccttgttactttgctattgctcatttttagatagaatttgttttcttgacattttggaggaggtgtgggtcagggtaacttttctgatttcacagagttcccatttctgttttttatgtgctgtgtaaaatgaatatggtgacatagtgtctgagatttctgagattccctggccctgttcccctcctgaactgttacctggttttctcttccttcatccctcctgtccctggagggacagtgtggagatttcacaggggctccagccttcacccactgtggaggcaggtgaagccttccaggctcgcttgttgcactggctgagcccgtttccagggagggcctcttgcctcttctagagctctctgttctcaggtctattgcttccctctgcttcctcctgcacaggcacagacactggtgcctgtgggtgtcgccagcccggtcctctcccctatcctgccaagtgcctacttctcactcctggcatctgctctgggcagccagggctccctcccttcacacagagcgtctctgccctctgcacactgactttttcctcacacacaggtccccctgcctactctaacctgtgaagggctgtcttctccagcacacacaagctgtggcctctctgtccacttctggattgcctaggtccctgtaggacagtttcatccctgtaaccctggaggctgatatacagtagctcttaataaaatgcatcttgttacctgaaaaaagatcagaaagtttcaagagacagcagtgctattttaagaagaatttctataaaagtgcagttagaaggtaaacaaggaacacttatacctaataatgaagttttaaaataatgaaatttgcaaaataaaaaaatcttccattagatttaaagtgaaactaattctttatgactgtgtgaggtattggttttgctttgcttttttggctagcttcctagttttttctaaatccacgttgctaagctttggtttcttaggttgggtactgatttctgcagatacagggaatgtgtacatatccggtttagactaagtttgtttcttggtcatgtttactatatatgtttcagataatacctttttatattttgaatgcaacaaattactttggccgtatagttgataaacacatggatctttatgcaactctcaatgctgaaatgaatgagtattttaaggattctaataaaacaactgtggaaaaggtggagaagtttggattgtatggattagcagaaaaaacgctttttcacaggtaacacatctgtttacttcatctgtaaagttttgaagcatgaggtaactaagtggtgttgagttccgattttgacctctgtccatttgactgagtgtgtatgtgagcctggtgacagcggggtgtccccccagatgcctgctccagttctttgtgggaaactcttccccaggctcctgagcccagtgacaccgtgacccattgagccatcactgcgtgcgacatacacatacatctttaactcacttaattcttgccaagttcctatcaagtgggcatcattcccattctacagataagaaaacagccttggcgatgttacgaatgtggtgtcaggtcagctcgatacctggcatagtttgttccaacctggtcagtctgaatcacatgctcgtttgtacccacttcccttgaatccacacctggcaccacttggtgatagccttgaattcagaaactttgaaacttgacaggtgacgttgctcatgcctgtaatcccaacactttgggaggctgaggtgaatggattgcttgagcccaggaggtcgaggctgcattgagctatgatcatgccactgcactccagccggggccacagagcaagaccttgtctctacaaaaaacaaacaaacaaaaaagacaaaaggaaaaaaataaaaaaactttgagactttaatttgctatgttaatttttattatgttgttagataaaaggatttactcttattcaaaagtacatgtttttatacttatgtatactttaaataatccaccacttgaatttttgaaggccttagttttttatttctagtatagagtaaaatcatggcgttttggagtctttttatatgttttccatttcatggtaatttgaggcaaagatgatcctttctggaatctctgcgttgaaccgatgccccattgctctccagggttcaggtgttggaagtgaaccaaaaagaagacgcctgggccctggatgacatccttgtagagttcatcgatgaaggcaggacggggctcgtcacaagggaccagctgctgcatctcccagaacatttccacacacttcccccgcaggctgtggagtttattgtctgtagggtgaaacctgctgacaacgaaatagaatggaatccgaaggtgggtgattttggctttttatctattgttgacttttagaatatatttaaccgagaatatacacagaattgaggcctgtctggatttacagtgtcacgtttgggcagggaaagtgcagtctgcttagatccccacggtgtgtgaacgtcccagctgaaccctcggagaggtaccaggcagctgcaacactgtcttcaccactgtccttgtgcttacggtcacagaatctgtataaagtagggatgttggtaaaataaactgcccctcagcctaagcaggggaagcacctacaaaagtgaacattccaggctgggtgctgtggcctgtaatctcaacactttgggaagccgagggatgaggatcccttgagcccaggaagttgaggctgcaatgatctatgatcgtgtcactgcattccagcccaggtgacagagtgagactctgtctcttaaaaaacaaagcaaatcaaaaaacagaaaaaaagtggaaaagtggaccctccagccaaagagggggcacaatgggcggtcccaggagaggccaggtgattccactggtgcagggacgatgggccaggaaggagagatggagatcagaaaagctgccaaaggaagggtcatttcctctgggcttcgtggggtaactagggtgtcaccaaatagaacagatggggcgttgaaagcaaagagaaccacttgtgctcaggcacaggcacagaagagggctccatgcgggctcacgtggccatccagctggagtgggaaggcccagcccttgcagacctgtgctgagggcacaggcacaggggggcccgcgtctcaggcactgtccaggtggggtgggaaggcccagcccttgcggccagggagaaacctgcagccagtcctgcccatcactggagcatgagtcgtgttgataagcgctccagttctccaaggaaaggttatattttgcataattcgacaaatgggacatgaaataagttaattgcaattggtaaagtacaaacagtttgggttataaacaaagttaaacattatccaggaaataaacaagtgaatgtttccatgatacaggataaatacacaaccttactcttctaagtttagtaaaaggagcctttatcacaaggcagtggcattccttctttgtaatgactgtctgctgtgtaccaggtgccctactgggttctggggatgtagccgtcagcaagaatgtcacagttctttccccaagaaacatctgacctgtaaagatgactgaccaaaagtatttcttgaaggagcagccttctgtgggaatggagaaaggttctcctgtgtacattcttctgaattaattcaccaagtgcaagggggatggaaacgggcaggtccctttcgccctgctttgttcatgtgaaaatgtgtgtgagaggttgcttagacaggtcctgcctgttgtgttcctccttgagaggaaactgccatggccaggcatggtggctcacacctataattccagtgctttgggagcccaagatgggaggattgcttaagcctgggagttcaagaccagcctgggcaatattgtgagacccccatctctaaaaaaaaaaaattaaaaattaaccaagtgtggtggtgcatgcctgtggtctcagctactggggaggctgagtaaggaggatcgctggcaccctggagttcgaggctgcagtgagctatgattgcgccactgcactccagcctgggtggaggagagagaccctgtctcaaagaaaaaaagaaagaaaacaacagccatttactcagcaaggggtacacaaagaccaggccctcagctccagtgtcactggctgcaaggcagctccattgcagtgacggccttggagcaggaggaacaactttcacttcactttcattgagctttcaaagaaataggcatccgtgctttaaagacagattggcaggtgatggaggagatggggtacgcacgtccacagaagaaaatgtacagtgttgggtcccaaaggcacagacccccgccttgagctctgggaactcactagtacgaggccatgggcgagttcctttccacacctgcctcactaaactctgctgttagccttgtggacgagagggggtgatgacctctgtgatctcatagcattactgtgaggctcaaatgaaatgcatggaatattttgcaaactgtatggcatatacaaaataaggtattttgttaaagcctcacctaaaataatgttaagtgcttttttcaggttactaggtacattcatcataaaattgttggaaaattgcatgatgcaaaagtgatcctggctttgggaaatacagtttggattgatccaatggtaagtacgcattttttcttagaaataaatttgtttgaatgggcggctaaaattatccagattattctaagccctcacttgaataactgctgcatagaaacggtgacttatttggggatttgttagggagaggtgtttttcatgttattgggtcatgaattgggttgtgggtttagtttttgttcaggggaatattttacattgtaaccccagcgcacacgtgcattgtgtatgcgaggcacacgcacgcacacacatgcagccgaacaaagctttgtgaggactccatgctacattctctgatgctgacagtttctaactttctcattcaccacgcacttaactgagcacctgccacgtgccaggagcagtgctgggcactggggttccttctgtgagcaaagcagacgaagcccccatcctgcagagcagccgtgggagggggcgggggaaagggggaggggaggacacatgacaaggacatgtgactcacgggcctccgtgtctctccacggctgctggcaccaccctccctgcttgttccccaagagctccactcctccactcaaagttctgctgtattagacttaaatcttactatgaatacttaccagatttaacagagtcaatttataaaaacttttgctgaatgttatttttatgaggttggaaaagttttaacatgttaaaagggagtttggatgtaaggtttaagactaagcagaaaatggttttcagaagagaaaatatggattacaaatgcaggtaaatgaggagatttgggcatcttagttgatgttgtgatagtattgtgtttgtttcttgttggggggagaaaagcagatattttattaagcagagatttaaaagagattgaagtaaaaaagaaagcccacctggcagatgtgtccacactgcagcacgtgtggcagtgaccacggcggccagagggaaacagacccaccctcaccatctccacccgttcctgcccccacccattttgagcagagagaggctcctccacacattccccggtggacacacattcctggggttcacctaggaaggggccccagccagggcaggcctggagcaccccccaccctcaccatgggagggacagcccctcctatacccacactgccaccaacagtgccaggctgttgcagatttttatgttttacttaattttgtataaatggaaatggatgaggatgtttggttgcagaaaagacgaacagaagaaatggcccagaacaggattcaggtccttggcttaggtccttcccatcaggcagacgctgagcctcaggaggtaaaagtagttgagaaggaatgagaaagatgtacgaattatgcatctgactaggggtttatcccagatttgcaatttggtcttgactaggggtttatcccagatttgctcttgccacccccccaccacctgcccatatttctgtggcatggggtgaggcctggatgatttggatggaacctcaggtaggaagcaatccagatgctgccatggaaagccctgcacgttgtggcaagcgccgaagtgcagccaacgtggcaggctgaatgaaccagagaggccctgtgggaatgtctatgcttcagttaaaattcagagtgattactgctaatgttcaattttttcattgattcaaggtgcacattacaaacctttccagtttaaaaacctctgtcattgattataatgttcgagctgaaattttgtccatgggcatgggcattgataatccagaacacatagaacaactgaaaaaattacgcgaagatgctaagataccagcttgtgaagaaagcctaagccagaccccgtaagtggatttctgtctcctttttggaagagttgttttttggaaatacaactcacaagtgttaaggacatgttttatgaaagtagaagagttggctgggtgcggtggctcacacctgtaatcccagcactttgggaggccaaggtgggcggctcacgaggtcaggagatcaagaccatcctggccaacatggtgaaaccccgtttttactaaaaatacaaaaattagctgggtgtggcagcacgtgcctgtaatccctgttactcgggaggctgaagcaggagaatcgcttgaacctgggaggcagaggttgcagcgagccaagatcatgccactgcactccagcctggcgacagagtgagactacgtctcaaaaaagaaaaaaaaaaaagtagaagggtttttaatgagtctccatgtacccatcactcagttgtaataatgaccaagattttggaaatctagttttatctataccccagcccacacttgcttttgttggagtattataaagcagatctcaaatatagtattttacctgtatttcttacagaaaggattgttgttaactttttcttgacaaataacgcacacacagaaaagtgcgcacatcagacgtgatgtgtttcctgaacatacctgtgtaaccagcccagatcaagaaacagagcctggctcagagcctcccctccctctaggtactccccctccccaagaggagccattctcctgatgtcgaaaagcagggatggttttccccagttttgcactttgtttgaaaggaattagacagtatgcctcctctccatagtgagttacagaagctaggctcaaaggaggcataaattctctaaattctcacagctacataatgttcctttgtatgaatataccattatttgtttacccattctactgttgactggggaaatttccagtttggggtacttcaggtaatggcgctttaaacattaccgtacatgtcttttacaaatatatacacttacaaatatatttctgacggaatgggattactgagtcatagttagagttactacccaatagtgttccaaagtggctgcgccagcgtctcctcccatggggggcattagagagactgtgacagtcactccgaggagggatcctggcagctccagagggggaaggatctgtatcaagaactccttccagccaggaggaaaacagcaggcacctgttaggaaagtgggcaaaagacctgagcagccacttcaggatacctaattaccatatgagaaggtgctggaactcctgagtcatcagggagatgcagatgaaagcccagggagtaacaccacagcatgcccagcccaccagagaggggaatgagagaaggaaggaaaacacgcaccaagtgtgggcagggatgagagtggcagggcttcccaaaacttgaccagagcactgttagcacagctaaaaaggctcacagtgattccttcaattgcatgtgttttatcgtggcaaaataaacatgacaacagctgccatttaaactctttttaagtgtacaattcagtggcatttaggacattctcagtgttgtgcaaccatcatcgctatccatctccagaacttgctcatcatctggacagaaactccatactccttaaataataattccagagtccaccccccgcccagccccctactctcctttgtctctacgaatctgccaatcctgggcactttaagtggaatcgtccactgtttacccttttgtgcctggctcgtctcagtgtaaggtcctcaaggtccacacgtgttgcagcccgggtcagatttccttccctttgaagctcatcctccatggcatggatcaccacgtttcacttctccattcatcttcctgcgcacacctgggctgctgcccctcttgactgtggtgagtgtgctcctgtgtatacaggtgtacaaatacctgtttgagcccctgccttcacttctctggggttgctactcagaagtggagctgctgggccctgtgggaatcctgtgtatgatttttggggaacctccatccaggttccgcagcagcttccccattgcctgttccagcagccatgcccgaggcctgcagttctccatgtcctctccttgaccccgcccgaggtgcaaactccaggtctcttcagggctcttccgggcgtgcctctgtgcgcttgtgcaattctaaatggcccgtacacacgactgcttttgaacatcctaattccccagtctcttgctctctgcgtctcctctggcccagcccacccaggcatcctagatctgtagggcctggtagctttagaagcaggcctctgtctcaaaaaaaaaaaaaaagtgtttttacccatgcactccaagctctgtcctctactgtccccagacaggctccacagatgcacatgattatttgcaaatgaagtctgctctgctttctccaggccgagggtgacagggaccagtcctgctcaagaccaggatcatccatccgaggagcagggggggcaggggtgagtaagaacaccacagagcttcctcccagaatgccagggacagggggccatgtgtgagggggacagtgcatggggacacctgggaggagtctccacgggccgagggaaggactgggctgtgagttccaggagcagggatgaaggtactcagagcggagcagaacacagagacccggaggtgctgggccaggtcttgtggggcctgtggccactgcaaggaatgggttcttgctccacagaggcaggagccatgagggggttttgagcagaggagtgacttgaacagaagatggttcgtggctactgtgttgagaacagactgaagggagggctaggggacaagactgtgccaggagcttaggacaggaggatggaggcttggaccaggtggctttgtggaggttgagaagctgctggtttatcagtgtgttctgctagagctgacggggctccaggcagcctgcatctgtggcaagagcacagccctcgtggcagggcctgggagccccagaggtgtgagaggaggggtccgggggtgagccctggtgcctccactggggagcatggagtagggtggggacgttgtagccagcaggtggagggaagcctggagaggtgagtaggcgagggatgcgtgtcccggacaggagtgatgagctagcccaggtgcagctgcagacccagcgagtgaggaccaagacagacagctgggctagtggcctgctggactagtgggctgctgggctagtgacttgctgggttagtggcctgctggactagtgacttgctggtttagtggcctgctgggttagtggttgttggtgaccttgagagattcctaagttcagctgaaaggaggatttaaaataatgtgggccaggcttggtggctcatgattgtaatcccagcactttgggaggccgaggcaggaggattgctcaagctcaggagttcgagaccagcctgggcaacatagcaagaccctgtctctactaaaaatacaaaaattagctgggtttggtggtacaagcctgtagttctagctacttgggacactgaggtgggaagattggttgagcccaggaggtttaggctgcagtgagctgtgattgtgccactgcactccagcctgggtgacagcaagaccttgtctcaaaaaaaaaaaaaatgacaaagataaacatagtatgatctaaagttttttagttttttaccttaataaaaatggatacctataggattagaatacagggtagtttccctctactttcaagaaaaaaaaaatttcccatacttttaagatacttttttagaaatgaagatgtcattaaactttagtagatttaaccaaaatgaggtttggtggcttatgggaagcactgactttgagccccagccctgtgtaaaggctcccacagccccctttcccactgtagctttgtggttaagggagcttaacatacccgtggtcacgaacacagagcatacagcactgcgaggtttcacagagagcctgctagaagagaccccatatcagacagctcctggagaacaggggatcctgacaggtagagagggaatggcgagaatatttcatgctgtgacccgcagatctggaagccacaggacttggcggttggcagatgttagggaacgtgggtctgcaggtctgagccctggtgcctggggaatgctggtgcggtggacagtgacaggtggtttccaggcacagcccacagcagaggaggagaggctgaggtgggctgtggaggtgccagtttttaaggttactgaaagtctacgcctagggctcaggaaagcagctggggaaggctcttggtttgctgctgtttgaggagagtcaaagctcagtgagtgtgaggaggaaggaatctacctagcagaggaggatctatcgaaggagaagagggtgggcgactgcacagagcctggggaggggcggtggctcaggacgctcgctgcctgaatctggaaagtgccacactgcaggcttcttctgggcccctcagaagacaggcacggacccctccttctcacaggtttgtgtgtgtggctgtcagaagacagcacacccctcctcctcgtgtgtgtgtgtttgctcatttaggcttgaattgtctcttcaaagatgtacaaaaactgagtcacattgtcacccacgaggaagggagctggctggctggggagcaggggtgagaggagcttttcagtgtacagccaaatttgacttcttttaaaatactgaaccacatgaatgtggttacctattcaaagaaccaaaagaatactaccatttaaaaattttaaaataagtattctagctagttattaagtaggataaaatatggggcagcacgttgaatttagtacgttcccatatgtttaaatgtgtgtatgtgtccatgtgttttagatagaaaggcatagaaggcaataatttcttttttatgcaaagaatatttctagaagtgggcccaaactggtaacaggggtggtctttgggaagatggccccagagactgggtcaggggaagcaggaaactggcttgtcactttctgtcctttggtcctgtttgaagtgggcagcagtgagtatggaaggcaaaccatcttggtgaagagtgaaggcctgcctggtcccatgtcagtcatgcactgtgtgcttgcccatcatccttgtcggaaggaacagagttgatgggctgcctggggcatcttaaatgtcataagctctacgtgggtctgactccacggccacaggcacttcacggtcatttattgcctgccttcctcttccacttgggcagttcctgtagagagccaggtgttaacccctgcctctcccgtctaggacgcctccagcagaagatgctgcttgcctgcagagcccccagcctgaggacacgggtgcagaaggaggggctgagtccaagacgagctcagaaaaccagaagcctggtgggtacttggtattcaaaagatggttaagttcaaatcgttaatgtctggaaaattgctaatgtttagactttctactttgagatgaaatgtagagaagatgacataaactgatatcacctaactgttcttatttttgacaggtcagcccccagtgttttgtttttgtagtttgaggtctaacttccatccagtgatgcgcacagatgttaagtgaacagctcagcagagtgtgtgtgtgtgtgtgtgtgtgtgtgtgtgtgtgtgtgtgcgtgtgaaccacacccacatcgagctgttgaacatttccaggaccccagcagtctcctgtccggaaccctcctgactgaccattctgatttctgacaccatgagttttgctgacttggaagcatatagaatacattcttttattttaaacagagatggagtctcactgtgtggcccagactgattttgaactcctggcctcaagtgatccttctgccttggcctctaagagtgttgggattataggcgtgagccactgtgccccgcctatagtatatgttcttgtggcttccttcagtcaacattatgtgtgtgaaattaatctgtatgattgcaagtggaggcattttttcttaatcttggaaagtatttgcatattgcatggctctctccagactttacatctaggctcacttttattgcacagcgcctcagcaaagaggaggagctggcgttaatagagttggctgacctcggccaggctaattgcacggacttagcagacatttctgacgtgtatgaacttggcactgagttaggtgccataaagaaaaaagataattagctgggcatggtgggggggcacctgtaattccagctactcaagaggctaaggtgggaggatcaattgaacccgggaggcagaggttgcagtgagccaagatcacaccactgcactccagcctggatgacagattgagactataaaaaacaaaaaacaaaaacaaaaacaaaactggttgggcacggtggctcatgcctatgatcccaacactttggggggctgaggcaggcaaatcacttgaggtcaggagtttgagaccagcctggccaacatgttggaaccccatctctactaaaaacacaaaaatattagccagctgtggtggcgcacgcctgtagtccctactacttgggaggctgaggcaatagaatctcttgaatccaggaggcggaggttgcagtgagccaagattgtaccactgcactcttgcctgggcaacagaatgagactccgtctcaaaataaataaataaacaaataatagataaacggggctgggtgcggtgtctcacgcctgtaatcccagcactttgggaggccaggacgggcagatcgtgaggtcaggagatcgagaccatcgtggctaacacggtgaaaccccgtctctactaaaaatacaaaaaattagccaggcgtggtggtgggcacctgtagtcccagctactcgggaggctgaggcaggagaagggtgtgaaccctggaggcagagcttgcagtgagccaagatcgcgccactgcactccagcctgggtgacagagcgagactccatctcaaaaaaaaaaagataaatgggacaaaacccaagccccttgtggaaggagaattcagtgagggagaaggaaaggagaggtgaggagaccatttgccgtcactggaatttatcttcgtgtggccttttaattttgatattcactgtctttatgaaatggagttagatcattgctccttgtcttgacaaatcttagaaattgcccagacaacatatattgataaactcatcccatgactagacaaagtctccaacactccagtgctgggagctccagctttccacactgcagatgttctgcacctctgctgtggtccctcattccgcttcccaggagggcgggataagatcctgggagggtggaccctgcatggctctgctccctttgatatgcatccgagacagtgaaacccacagataacacagctgaggtgctgagagccccagagggtggtttgctccctgacaggttcattcctcattgaggatggagagtgtgggaggaggagccgcagaggtggctcctgtgacgaaggcagccttgcccactgcctgtgtgattcccatgcatctctgggtatgttctggaagttgtttcctaaggaaattcttccagccatttccccacacagcttttttttggggggtgggaggggattgttgtgaaggatgggggtcatctggaaggatgggtttagacgcatttcattattgccgtggtccaaacccaggttcttcatcacagtcccatgtgctgctcttgctggccgtgactgtggctggtgaggtgagaggtgcaggtgaggagaaaggatcttccggagccgagtggtacgtgggggactgaatgtagctgttaaaatgcacatacacgttctcttcataaagtttgcccctggatttggccacagcggggggcagctggtttcgctgtgtgggaaccactggaaaagggttctgaagagttctggaaaagacagtttgcaaggccagctggtcagaggaacagggtcattgggacaacagttgtcattaagaggattttcccagagcagtgtttattccacggtagcagaccgggatccagtagactgcagagtggggctgaagagggtctgcactgtcgcaggccctgctaccggcccatttgcactttgcatagagcctggtgtggggccctcgggggacgtcagggcagccaggtgggtcccccaaaccatagcccttggaggacatgcagttgtttactgagctctactgggaagctctggctattagatgtccactgcagccaccaggcacttggccaccttcctggaagagccgttgtctcagctggaagagacttcatctctgggctcctgctcaggttcaggcaggtgaaggaaaacgtcatgcactttcttcatggttcttcttgccttggcttcccgcagggtttctggtatttggacagtcagtgtctccatgtggctagaaaagtatgatgcatccattgtgctgccacacgctggtgaggggcaaggcctgagcttcagaggctcatcacagttagggcagcattcctccgcaggatctgccagccctgctgcagctggtcggtctcaggtggaccccgtgccctcctctgcagacgtgacacccgcatgccactgtgccaggcagggcttctggaggacgcaggtgtggggttgtttgtgttgcatgtggcccggctcgggggctgctgcctgctcttgccctcctagctgtagctgtgctctgtgcaagcaaacacgatctcgggaccctaaactccctctgccaaaggggaagttacacgctggacctgggtctaagcctgtctgcttttgttcgcaagcagacagctgtcgcttcatagccctgggtcgtagccccgtgtcctgttatgtctcctgtcacatgtcactttatcttgtgtaaagctagctttcctgagctcgaggggatgcgtgattgtctttgtcctgccccaccccccgccgccctttcttcctccagcttgctctcccttttagacacagatgtttaggaagcccctttggaaaagcagaggccatggcgctcctgtgatttgtgtttcccggggcacatcctcaactttggataaatcaacctcgagtcggctgagactccctcagtccctttttggttgacggctccgaggaggaacctggccgcttgctcccagaagcggtgtcttgttcttgttcgcgttcagtggcaggactgcctccttcgcaccctagcttcacggctctgtctttaggatcagtcccagctctgtgatcaggccaggccaccccgggtttcctctgctcgcctcctctcagaagggcttggggattgtgctctccaaggttcttgacgtcactgggtcagtgcactcttttcctgaggccactcgatggcaggcggcatgtgacaccgaggatggcgctttctcagcaggagtctgtttgtttctttgccattgttttctataccatgaataaaccacagagggtggatctgttttccgtctcaggctactgtgattccagcagctgtgaacattcttactccggtgtttggatggaagccttgcctgttggagattgagaagttcacattgcgttgtttgagaatatgtcatgtccagcactggctcctcgtgcgtgctggccgctgtccttagggcatcctggcaggtcaaacagctccagagaagcctgcatgtttgtatccaaggccagccactgcaatgaggttctttttcaaatgagtgacttcacttcctggtcattgaattttaatacttgtcaaaggctgtttttattttaaaataaaattttaggccaggcacagtggcttaagcctgtaatcccaccactttgggaggccgaggcaggtagatcacctgaggtcaggagtccgagaccagcctgaccaacatggtgaaactccattcctactaaaaatacaatattagccgagtgtggtggcgcatgcttgtaatcccagctacttggtaggctgaggcaggagaatcgcttgaactcgaaggcagaggttgcagtgagtcaagatcataccattgcactccagcctgggcaacaagaacgaaactccatctcaaaaataaaaattttaaaattttgtttacctatgtgatggttttaattttttctaactgttctttgcagctagatactagggttactcaatttacacttttatgtgattcctcatctagacgttgcataaggtacaaaaaagtatatatatatgtgtgtacatgatggagttacatataaataacctgtaggaaaatatgaccttgattttgtgcagaaactttatctggaaacactgaaggtgccttcattagcagaactgcacagccgcctctgaaaaggtacgtccactcggcatggaggagtcggcgtcccttacccagttaataagatcaatgaatgcgcaggtctttcttcttctagcttccacccacaaataaaatggttccaaaaagaagatgtcgtcatcttaaagataagaataaggaatgtaaaggactacaagtgtcagtatttaagggatagagtcgttttcaggtaggtttatgtatagtcatataaagtaaaatagaaataatttttagcattttaaaaggctgactttatttctttttataaacccagtgcttgggtgggagacaaattttacctggctgatctggagctgcggggcaacataaggaaagatgactgccaatgtgtgattagaaacgatgaacctgtaatcactctggccaaagagagaagggaggcatggtgtcacctactcagacagagggtgagttgggatgcactcagcgggtggtctttaccctgcgtgtgtcatattcacgcgctcactgtcagctgttctcttgaacagaaccccaacgtggcttttgattttgatcactgggaagactgtgaagaggacagccacttccccaagggtaaggcatagagcgcccactctccgaggggttgtaggttctgagggcagtgagggacaccatcacccacttaggaattcagccttggtggaagtggaccgttcatgtcaagccctgagaaatcagttttctctttgtttatcttggtgctaaacgttctggtttgagtacttttcaacccttggtgataaacacaccttttaataacacactacagatattcttcctagaagaataaattatttgtaagcagaccaatttgacctgctcatttcttacctaaaataatgaaaatataagatacatagagctggaacccaaggcatttttttctgcattgacccaaataatggggggaaataaagatttgctgattagtctacacttatttgttataatatcttactcctttagtagtgaattctaaaaacctgccgtacacagtgacagaggtggttgaagacagtagcagcacttcagaggatgacgacagtgagagtgaaagagaaggtgaatgacgtcctcaagagcggctggaagatgttgaacaaaaatggatattgccatgtgaccgacagttaagaaaacagtcagtcataaccaaatctttttcttttcttttctttttttttttttttttttttttttgagacagagtcttgctctgtcggccaggctggagtgcagtggcatgatcttggctcactgcaacctctgcctcacaggctcaagcaattctcctgcctcagcctcccgagtagctgggattacaggcatgtgccaccatgcctgaccaatttttgtatttttagtagagacagggtttcaccatgttggacaggctggtctcgaactcctgacctcaggtaatcctcccacctcagcctcccaaagtgctgggattacaggtgtgagccaccacacccggccaaccaaatctttctttacctcaaggataaatgattactgtcaccttgtggtgctggacttgataacggtgagaaattcttcattgacttaaaaataggctgatgataagaccatcaaaggagggtggacacagagaaacagcaggtgtggtctgattccgccggcttgtctgtcctgtctggcgcctctcgccactcaccctggcagagcagacatgcatctgggtgatgaaatgcactgtctggagtcagtccattcattttttttcacctagacctttgctacattgctacaaacctgatcttacacatataaattgaggtttctaatgtacacacttagactcagcaactgttgaaccagccctttcaaccatgagatagtgggatttaacataaccatctatgtgaattgatagtgttagcattcttggatagtgatagctcctcagagtaagttgacttctgatgaagagatagtccagggatagaaattggattgctcagtaagacccaggcctttccggggtgaagctgctggttctaaacaatcccttggacctgcagagtcctgagcaaatggcacaaaggttgctttttagtggaaattcacaagggcctgtggggtgcctggaggtgatctttgaatgcctacatgtcgtgagccctgcagacattcgccaccccatctgcattgtggctgcagcactggggggggtcaccaggtttaggggaggagtgtatgtagtcatggccacacccagaggctggcttttgtgctttgggtttctttgttgactgaaaaagcgagaaaggtgagctattgggaaattaaaagtcctgtgcactctgtgtcttgtttatcagctttgcctcggaatggaaaagaatttggatagaacatgagtgttgtgtgacggccccaagatctttattatttttttgtatcagaaagcgccaatgcccaggcttatgtatgtcccagcagaagccaccgcttgaactagaggtgaactttgtcatcaagctgtcctgtgagcaggtctggatcacactctggctcagttttctcatctgtaaaatgagacatcccctcattgtgtggcctggccttgtctcagggagcgcccgccgagtgctgctgggttgggcagtttttctgcccagtggctctgatgggggctcagagccctggcctcccctgggaggacacgctgtgcagccaggacagctgccgggagtgtgcccaggtcactgctatggccttcgcagggtgactggcaggtatcaaatcagcccatgaaggaagatggtgattttccttttttgtagctaaattgggcaggctcttgggaagtagaaagttctggtgtttttgctggtgaaggttttgactgtggagctcttctaacacccatatcagtgtctgtttctctgcatgtggctgctgccctgttggtggagctctgggggcagagaccaggccgccgtccagtggcgccccgtgcgcaccagctgcctgctgtttacacccaggtgcgccgagtctctttcatacagcacagcaaatgataatagctagtgacaatgtgtttcctgtgcactcgtgaaaatgcagggaggacaactgcatgcttagatctgtttcttttttcagacattcaaatgttctaatatctgaagctaacattttgtaggatataggatgctgattatgtgaacaattagtcattggttttctgtactgctatgaatatgtctgatttcaagttttggtcaaatatctaaaatgcaaggtgaaagtgcctttgtctctatgcttctaaaatcgctcatgcttagttgtggtatggatgtcttccgcagtgtatcatcaataaaatttcactgttttcacagaaatgttgctttttacattttttaaacagtactttccctgaatgccaaacacagaataaaactttactcaccacactttctggtttgactaaaacgcccgtgaaggctgctagggagccagcgatgctgactggcaatgcaggcgaccctcgtgatgagcacaccggctgtggagggttctggatggaggctcagctcttgccattcatcctggcagatagatagatacatggcacgcacatcacaggttcagcacagggcgccagtactttacttttagggtaggggagagtgggtgagaaacatttgtactttaatatttttgtatatttatttactttttgagttggggtctctgtcatccaggctggagtgcagtggcatgatgatggctcactacaccctggactccaggctcaggtgatcctcccacctcagcctcttgagtagctggggctacaggtgtgcaacacgatgcctggctaatttttttatgttttttatagattagatacatgattttgccatgttgcccaggctggtcttgaactcctggactcaagcgatctatccgccttggcctcccaaagtgctgagattataggcgtgagccaccacacctggccagtaatttactgttgttttaaaatctatagcaatcaatcaatcaatcaaagcaaaaatgtcatccattttatataagagaccttattgacattgagtttaaagaacacctttcatttaagtgtgatgtgccccttgttaaatagctgccactgtaatggaggcttttattcagcccttccctaagcatctgcctcttgtttgttaggtgacatctcacctgacaacaactttagcaaacaaacacttgccacttcccctttctagaacccccactcagagaactaagaatatctaaaaataacaatattttaaacatctgagtatattttattcgtaagaaaaaaaggaagaaataaccacaaatattgcttaagaaaataaattcagctgacttggctacaagagacggagcttgttactcagggtcttcctccggtgggaccacttccattagcatctgaaggtgcatggtaatcggctctgaaataagagtcaaaaatgagtacagttagttagactgaaattcgaaagtttcactggagttgttgtgggtgagggtgacattgttttcagtctttggtgatgcgtcacctagaccctgtgctcaggatggccagctttcctgccttctggttggatttcacactttcctggcttctgtcttctcccagaattgcaggaatagaaataaaaacctcctaggagtgtccggagggacgactgcactttccagttcagatgagctgaacaggagaaacaggcaggcttttaatcacattcacttaataaatcttaactggctgttacaggctgccgcagccagagttaaattgcacacagcccaagtcctgtcctcaaggagctcctggaagaggatgcccaggaagtcttaaaggcttttagaaatggggtttcctaggcaggcggatcacgaggtcaggagatcgagaatatcctggctaacacagtgaaaccccgtctctactaaaaatacaaaaaaaaaaaaaagaaagaaagaaatagggtttcctgcagttgaatctgttgtaaaggataaaacattgtgaatgtaatatagactttttgtttttgtgttttttgagatggactctcgctctgttgcccaggctggagtgcagtggggggatcttggcttaccgcaagctccgcctcccgagttcacgccattcttctgcctcagcctcctgagtagctgggactacaggcgcccgccaccacgcccggctaatttttttttgtatttttagtggagacggggtttcaccgtgttagccacgatggtctcgatctcctgacctcgtgatctgccccctcagcctcccaaagtgctgggattacagacatgagccaccgtgcccggcccgatatagacttttttaaaggtgtaattccgtctcttttgatgtactttgacacaagtgctttcttttcagaagcaaaagtggctactaacatagctaaacttttaaacaactgtcctaaaactgatgagggtcaggactgctgaaagagtgagccctgtgcccttggcattaaaaggcttgggccccagcccagttccccaggccaaggccatgactttttgtgtgtctttgcaatgctgctaggcctcttagatgatgtctgcatatcagacaaaggagaatggtgtttcaggatgagacgcatgatggtgggaatatgcctaatgctactgaactttacactgacaagtggctgagatagaaacgtttatgttgtgtgtctttcgcaattaaaaagaaaatggggctgggcgcagtggctcatgcctgtaatccctacatttcgggagactgatgcaggtggatcacctgaggtcaggagttcaagaccagcctggccaacatgatgaaaccccgactctactaaaaatacaaaacaacaacaaggaaattagccgggtgtggtggcaggcgcctgtaatcccaactactcaggaggctgaggcaggaaaatcgcttgaacgtgggaggcagaggttgcagtgagccgagatcgtgccagtgcattccagcctggacaacaagagcaaaactccatctcaaaacaaagaaaatgggccgggcgcagtggctgacatctgtaatcccagcactttgggaggccgaggtgggtggatcacctaaggtcaggagttggagaccagcctggccaacatggtaaaacctcatctgtactaaaaatacaaaaattagctgggcgtggtggtgcacacctgtaatcccagctactcggaaggctgaggcacaagaatcgcttgaaccgggaggtggaggttgcacagtgagctgagaccgcaccactgcactccagcctgggcaacagagtgagactgtgtctcaaaaaaaaaaaaaaaaagaaagaaagaaagaaaaagaaaaacggccaggtacggtggcttaggccagtagtcccagcactttggagagccaaggtggaagggtcatttgagcccaggagttcaagaccagtctgggccacctagcgagactccttctctacaaaaagtaaaaaaaatagccaggtgtagtgtgtgcctgtggtcccagctacttgggaggcccaggtgggaggatggcttgagcccgggagttcaagactgcagtgagctatgaccatgccactgcactttagcctgggcaacagagcaagactgtgtctccaaaaagaaaagaaaatggtgctttcccttcctacttattacagtaattgacaggaacaaaacaatcaagggtggacccagaggtgtacagtgagggcgtgggcatgtgtcctcctgggacgagggagatctgccagcagggtgagacactgtgacagaggtcttggagtcaggacaggtgaggacgccgtgcctgcctgcacctcacagaggccaagcggcccttctgttggtacttacttgagattttctgagcccatccaaacttgtagtggacaaacaggaagtaaaataaaaggccgcttaatataaacagcacacagtagaggtactcccaggtgggcttgctgatgattggagccagaaccaaaaacacagagatgagtgtcatcaagacgggaatgactacgggcacctggagacgaaaaacaggtcatgggtacccattttctttttgaaatttttcatgataaaaaaccgatttttataaaaagagtatgaactccatgtaccccctcctccaatttcaatcattttaatgtaattttgccaatcttatttcatctataccttttaaaaattttctttactttttaaaaagttttttggccgggcatgggtgctcacacctgtaatcccagcacttagggaggccgaggccggtgggtcccttgaggtcaggagctcaagaccagcctggccaacatagtgaaacaccatctctaccaaaaacacaaaagttagctgggcgtggtggcaggtgcctgtaatcccagctcctcaggagctgaggcaggagagtcgcttgaacccaggaggcagaggttgcagtgagccgagattgcaccattgcactctagcctgggccacgggagggaaactccatctcaaaaaagaaaaaaaaaaatagataaactgtttaatgttttagcatccactgatgatcgttgccttcattgtttcatcagggtttgcaaaatggtgatttttctaatttgtaatttcttcctcaattatctgaaatgctatatgaagtacttcaactttctggttattctgaattgcagttcatacaggaaaggcaggattagtgctgtattctgtgtgtttccagaatgacaagttgggcccctgagacctccaaaggcaactccagcctgtgggtttttctatacatggtgagtttcaacccgttgtagtcattgttcacgttgttcagaaggtcctgtgcggggcggcaggaacccctcacactgtcctgggccctgggaatgggacgccagtgctcttcaaaagcctctttgttttctgggtgacaagaagtgccatacctgggttttcatttatctctccagagccagacgtgggttttcatccatttctccagagagctttgtttccttttagcaggaaatggcatttaaagaccataacctggaggctggctgcagtggttcgctcctgtaatcccagcactttgggaggctgaggcaggcagatcacttgagtctaggagttcaagatcagcctggccaacatggtgaaaccccgtctctactaaaaatacaaaaattagccgggcgtgatggcagatgcctgtaatcccagcaacttgggaagctgaagcaggagagtcgcttgaacccgggaggcggaggctgcagtgagcaaagaatgtgccactgcactccagcccaggagacagagtgagactctaaaaataaataaagaccataacctgggtgattggagtactcattatcctttttcaaggacagagattaattttggtattctcttattaggaacaaagttaagtttgctgggattgttttgttttcatttttaagtgtcattgcatttttcctttgactgtgtttttttgtttgttttgtttcccaagacagagtctcgctctgtcgctcaggctggagtgcagtggcgtgatcttggctcactgcaacctctgcctcttgggttcaaacagttctcctgcctcagcctcccaagtagctgggattacaggcgtgtgccaacatgcccagctaattttttatttttagtagagacagggtttcaccacgttggccaggctggtctcgaactcctgacctcaaatgatctgcccatcttggcctcccagagcgctgggattacaggcatgagccaatcacacccagcccctgaattaaacttttaattaatggattttcggtcttcagctacctttgcataggctggacctagtcatgatatattatctttttagtgtaactgggttctgtttgttaacattttattttagattttttatatcgttattcctaagtgagattggtgagtacatttcccttttttgtgtgaagttacctttgtaaggtttggtgtcaatgttacagtctaaaaataatttgaaaaatcaataaaatcaatagctaaccttaaaaaggagaaagcacaaacacaaataaaaaataaaaatgggcaattaatctttacaacataagttatgttctaaagattaatacaaatcataagactattttgtacaactctatacagataaatttgaatacatggaagaaatgaacaattttctaggaaaatgtaatttactaaaactgatcttagttgcattagaatcacagggaaattctaaaaatcagacaattccagtattgcttaatttattccagagcattgaaaaaggaggaaaactttcaaaaagactgattattattcactcattcattcatttctgttttttctaacaccttaagtttttttctgcttattagttccttctgttttcttttggttttctgttgttctttatcttgcttttggagttgtctatttaatttgttttcatttttattgatatatttaatgtaatggagcttcctcaaagcactatttaagctgtgttcatagattatatgtcctgtcatcattactgctatttctaggaatttatgtactgtgtgtgtgtgtgtgtgtgtatgtgtgtgtgtgtgtgtgtgtgtgtccgagtctcactttgtcacccaggctggagtgcagtggcacaatctcggctcactgcaacctctgcctcccaggttcaagtgattctcagcctcagcctcccgagtagctggaactacaggtgcccgccaccacgcccggctaattttttgtatttttagtagagacagggtttcaccatgttggctaggatggtctcgatctcctgaccttgtgatccgccggcctcagcctcccaacatgctgggattacaggtgtgagccaccacacccggcctaatttttgtatttttagtagagatggggtttcaccatgtttgccaggctggtcttgaactcctgacctcaagtgatgcaaccgccttggcctcccaaaatgctgggattacaggcgtgagccactgcgcccggccagaatttatgtacttttatcttctatttctattaatatttcctcttggacccaaaagtttaacttttttcttttatcaatttcctgttttgtttcattaaagagagagaatgttatttgctttttggttgttttgatttctggggttttctttttgaaatatcaaggttttcttcatggcattaaaagctgtcagttttcagacaggtcccatttgcaactgaaaaaggtatactcgctgttgctggggttcggggcttgatacaaacctctaagatctatcttgctatattttagatccccagtcacttttaccagtgctgcgtccagatctgtcttggcctgaaggaggtgttttccagtcacctgttattaacgtgtttctccctccgtggatttcctgcagtttctgcttcgtaaagatggttgctatatggtttggtgaataggttttcaaaacttacctcttcattgtggattttagcctttagcatggcctgtctttgtcttaaataatgctttgggcctgagcacttgtctgataagatcacagcccctgtttttctgtatattcatttgcttgatatttctctgcctgttcttttaatttttcacagctttgaagatccgcctgaaaaatcttttactttcaatggctgatgtaagtccaatttaaatggagtaagcccgtttattcatataatgataagtctggtctccattctctcgtgttgttttatctttctgtatacaagcatcctctactcactgtcagtcttgcgtcctcgaagagtgatgttctatggaagaaccccccaggcctgtgtcccttcttttaaattcaccataggaaacctcaaatttcctgccaggtgctgtggctcacacctgtaatcccagtactttgggaggccaaggcaggaagataacttgagccaggagttcaagaccagtctggcccacatggcgaaaccccatgtctacaaaaaatacaaaaattagccaggtgtggtggcgtgcacctgtggtcccagctatttgggaggctgaggtgggaggatcgcttgagcctgggaggcacggttgcagtgagttgtaatcacaccactgcactccagcctgggtgacagaggagattccatctcaaaaaaaaaaaaaaaaaaaaaaaaaagaaacctcaaattcccaaccaaaaaacagtaaatgtgcatataaataacatgttacccaacacagattacattagatggtaaactgtgtttaaaataatttttggtgaccaaacagttaacatggttgttgaccaatgactgcctttaatgcaataacatggtctcgcaagacgtgagacgcttacacctcacactgtcagtacgcctacacgtggctttcagtacgcctacacgtgattttgatgtgtgttgaatttggaatgtaacttgaaacttttatcacacattttgtcaaaagtttatactacattttggggattcagatactgatttttccatataaatatcagctggaaatgaaagcatttagagatgcatggattctatagttcagggtgttaaaagctaataagcaaaaaatagcaatgacaaaaaatcctaataagcagtctacaagaaaacatcaaccaggaaggtattctgagggagatctgccagcagggtgagacactgtgacagaggtcttggagtcaggacaggtgaggacgccgtgcctgcctgcacctcacagaagccaagcggcccttctgttggtacttacttgagattttctgagcccatccaaacttgtagtggacaaacaggaagtaaaataaaaggccgcttaatataaacaaggctttataggtagggtcctttacagtatggtctgttttgtttccctcctttgtttaaatgttaaattttaattatttcatgtattctaagcacacttcctcttttttaatgtgtcttttggtaggtatgaaggatgtgtttttgttctgagagttactgtaactattatagctaatatattataactaatatattttaaaggggactaagggcattattatataaggatatattctgtataatatatgtgtatattatataagaatatattatatctaataggcacaatctatacatatataataggcataatatacatatatttaatgctatatatatttgttgtatatatgttatatattatgtatatatacatatcatgtgtatataaaaacgtatattatacatatacctataatatatacttatatacaacatatttatatcttatatccttatataatacccttagtccccttttaaagatattatatatgtatatatgtacttatatgtatatgtatttgtatgtataacagacatgtaatgatacacatatacatatatacatatatgcacatatatacatatacaaatatatacatatatatctattatacacatatattacatatattatacattatacacatatatagtacacatatatgtatatattatgtataatgcccttagtccccttttaaagatatgaattatattattaactgagcatataatacccttagtttcttctttttttagacattgtgtataataagcaataatgaagttagctaggtgttctcttcctcccagcatctaatttaaagtggcttccttattggcagcttgtctggcatactttcctcagttggcatatacttttccatgtgctttctctcgtccatgtttttgtatgatattgccagtgcataatagtggcatacacttctgtcccctttatctctcatcattaatcttagttctataatttgatatattcacctttgccagtgactttttggtttctgaagctcattctctgggtgattcctcaaggtctcatgtaattggcggggcacggtggctcacacctgtaatcccagcactttggaaggctgaagtgggtggatcacaaagtcaggagttcgagaccagcctgaccaacatggtgaaaccctgtctctactaaaaatataaaaattagccaggcgtggtggcacgcgcctataatcccagctacttagaaggctgacacaggagaattgcttgaacccaggaggcggaggttacagtgagctgagatggcgccactgcattccagcctggatgacagagtgacactccgtctcaaaaaaaaaaaaaaaaaaagtctcgtgtaaggatatttgccttgagttctttcatactagtgactgtagactttattctgcaaggtcagtttggctgggtataagaatctggcttacattttcctcctttgagtagtttaaatatgttgctccactctcttgcagcatgaagtgttggtggtgaaaagtttgaggccagaattatttcctttcctttataagtgaattgcagatgggagtgggaacaggaaaaggggaggggatgcccaaagcatttttttaaagctctgtaattttatcagcatatatttttgctgccaattttagctcaaaatttccagttacattgtatgcctttcagtatgttggttcaagatcaccctccatttttcctcccaccccaggaaatgtttcttgaattatggattttgggattctgttacttgcattttcttcttcagggactccaattatgcatgtattagattccccaccttccccacccctagtttttttctgtccccttgttttctctcaaaccctttctacttctgtctgatatttgttttcttccttttggccttctgtttcctagcatgtttctttgctcttatgttctttcttttctttttttctttgcaacggggtccctctctgttgcccaggctggagtgcagtggcacgatcttggctcactgcagccttgacctcctgggctcaagcattcctcccacctcagcctcccaaatagctgggactataggcgtgcaccaccacacccagctatctttttgtagagacagggtcttgctgttgcccaagctggtcttgaactcctgggatcaagtgatcttcctcccttggcctcccaaagtactgggattacaggtgtgagccaccacactcagcctctgtgttccttcttttccttcttgcccactctttatttctgaaatgatttttttccctaaaatgatgttttgaagtgctaatgggacatggcctctctgtggagccccttcccagttgagagatttgtatccacaggctccagctccttgaccctgatattcttgccaagttccatgtcctttctctcccagcagttgtttctcttgctgttgtcgtcagtgatccttatccttctggaaaggagtttttgtggggagtttctgggatcctcaagggcttaagccactgcagccctgctcctccacctcccctgggggtcctctgatcttcccactgagaacctcgttccacgtgcgccctctctcctgggaacacatggtgctggagtccagtggggcatccacttagagtctggagttggtggtaagacttcatttccttgatttgtgttgacaatgttggctgaagtgttttcctttggtatcctagaggctctgtctgtttctatgagggattttgtgcagattacaagtctatgctaccgtcataattttgcctgcaatgacttaaccaaggtggatctgccagactccaggcaggctgtgccatgactcagctgatgccagagacttgtccatagtcaagacacagggccagaaagaccactggatgtatctctgaaaacaaagtcctaaagctaaagacattgtccttattctcgtcctagttacttaagccctcagcttacctttttcttatgtctgttatcataagaattaaatagcaggttttttttaaagccccttaacataacaacaataaaattctacttcatccttattggtatatagatccacaccagccatgcagggagtgagagggagcccgaaacagatggcaagaatagactctgagtggttgcatgcacagcaatgagtctgcggctggagttcagaagttcccatcagtctatgaaaggaggccggcatagtggctcacacctgtaatcccaggactttgggaagccaaggtgggaggatcgcttgagcccaggagtttgtgaccagcctaggcaacacagtgagaccctgtctccaaagaaaaaaaaatgaaacaagaaaaatctatgaaaaatatatgtgcgagagatatcagaactgggctgggtgcagtagctgacacctgtaatcccagcactttgggaagccaaggcaggcagatcacttgaggtcaggagttagagaccagcccggccaacatggtaaaaccccatctctactaaaaatacaaaaattagccaggcgtgatggcagatgtctgtaatcccagcaacttgggaagctgaagcaggagagttgcctgaaccggggaggcagaggctgcagtgagccaaggatgcgccactgcactccagcccaggcgacaaagtgagactctgcctcaaaacaaatgagagccaggtggacctctttggttacagagacgggccacaggtattcgtgatgacttaataaaatgaataacaaggtggctaactggatcataaactatgctgtgaagagtaaactccactctaaaatacgatattttaaaagagtcaagtcagattggaactagaaggcatgcccctagcatttgaaagagttacatctaattcattaaaaaatccaaagccactcgtgactctggggctgcaagcttaccttgataggcctttccagctctttccttgtaaatctcatcacgatgagtcctagaatcgtcaggccataaaacagccatgcggcaaagctgaaataattgactaacgagtttatgtcaccagggatgatataaatcgttgctatgataccctaatagaaagaagaatggatttgtaggtcattactacaaaacactgttctcatgtcacagaagaccgaagaagcagtttttcttgtgaataaacactttagcatgaaacgaacttctaggcattccttcatagttggggttaaacctgactttggctatgatagctcttctctatgaagcttgcagaaaagacctgggaaatttctgaatctttgaggttgtgattttaagcaagggaaaaataaaatattaggttggtgcaaaagtaactgtgggtttttttgttttgttttgttttgttttgttttgtttgagatggagtctcactctgtcacccaggctcgaatgcagtggcgtgatctcggttgactgcaacctccgcctcccaagttcaagcgattctcctgcctcggcctcctgagtagctgagattataggcaggcaccaccacacccggctaatttttgtatttttagtgagatggggtttcgccatctcacggttttaatggtaaaaaaccgcaattacttttgcaccaacctaatatgtatgaatattataccagcttcataattaagaattttccacacagagagttttcaatgtgggctggggccctggattagaagctcaggtctagtcttggcctgtgttagttgtgtggccctggactggtatttcctgggtgtgttttcctgtcttcagaatgatagagagtagtggttctcctctgggggaaggagtgtagaccacccctggggctagaaatgtggatggtttatcagtgcccagaacagttgcacaaaacaagaaccatgcaccatggagaagctcccatgggcagatgtcaaaggggtggccaggcacggtggctcatgcttgtaatccagcagtttgggaggctggggtgggcaaatcacttgaggccaggagttcaagaccagcctggccagcatggtgaaaccccatctctactaaaaatacaaaaagtagccaggcgtgatggcaggccccttcaatcccagctactcggaaggctgaggcaggagaatcatttgaacctgggaggcggaggatgcagtgagccaagatcatggcactgcactccatccagcctgggtgacagagcaagactccgtatcaaaaaaaaagtcaaagggcgtttactgcacaaggatccggtgacttcttaatcattagagcataatgagaggcagctgtcagtaactacctgggaaaatgtcttgctctccttccctgtaagctagtgggcttttatatagagtttgttaccagggacccagcacagacaaatgcacacagaagcattgagggcatacactgtctttcgtggataaattcagacaaaggagcagatattgggtatgttgtttcacttgtcctgggactctttctatatctgtttcatagcaaggaataagggcatctgggtcatttggaagccgccgggcttagcaccccatggatggagtgtccccgccttgaagataggctggtagcgggatttgtactcacataaaagatgatggcgggggctggagtgaggcgcctgacgctgatgtaagaaagcactttgagcatgtgaccctcccggcccgccacgtaaatgagtctggaaaataacgacacgggagtccgctgaccagagtgcagaccatctgtccagggccactgaggacttgtgctccggggtccaccaaggagccctcgggaggctcaggaagggagctgagcagggacctgagcttcagatgggggtctgtcttcgggagacgagtgggttttggcagagtgagtgaggaggttaaacgcactgagagactaggtgtggtggctcacgcctgtaatcccaacaccttgggaggccaaggcagaggatcacttgagcccaggagttggagaccagcctggcaacatagtgagatcccatctctacaaataactttaaaaattttttaaatgtaccatttatttgtgttgggaacattcaatatcctcccctagctatctgaagctacatattaatattaatgtgagctctagccaccctgctgtgtgtagaacactagaacctgttcctcctgtctagctgtaattttgtatcctttagcaagtctctctctatctccctttccccccatgcttttcagcctctggtatcctctggctaaccagaatttcttgaaaaagttaccataattaaaaatttcggccaggcacagtggctcacacctgtaatcccagcactgggagactgaggcaggtggatcgcctgaagtcaggagttcgagaccagtctggccaacgtggtgaaaccctatgtctactaaaaatatgaaaaattagctgggcatggtggtgcacacctgtagtcccagctactcagggggctgaggcaggagaatcgctggaacctgggaggcagaggttgcggtgagctgagatcgcaccattgcagctaagatcgcaccattgcactccagactccagcctggacgacagagtgagaatccatctcaaaaaaaaaaaaaaaaaaaaaaaaaagccagatgtgatggcttacacctgtaatcccagcaatttgggagcccgaggcaggcggatcatgagattagaagttcaagaccagtctggccaacatggtgaaaccccatctctactaaaaatacaaaaaatcagctgggcatggtggtgggcgcctgtactctgagctgcttaggaggctgaggcaggagaatcgcttgaacccgggaggcagaggttgcagtaagccaagattgtgccactgtactccagcctgggtgacagagtgagattctatctcaaaaaaataaaaataaataagaggagaagatataaaaaacaggagcctgagctgggcatggtggctgtcgcctatactcccagcactttgggaggccgagacaggtggactgcttgagttcaggagttcaagaccagcctaaccaacatggggaaaccccgtctttactaaaaatacaaaaattagccaggtgtggtggcgggcacctgtaacctcagctgaggctgaggctgaggcaggagaatcacttgaacctgggaagcggaggttgcagtgagccgagatctcaccattgcactccagactccagcctgagcgacagaacaagactctgtctcaaacaaaaccaaacaaacaaaaaaacccaggagcccttgaaacatagcagacaaaaattggcaaatccaatttgagcacaagatttgaacattacaagttataatcttgatgatcatataaaaatctagatataattatggaatacacattatcttcaagaccacaggaaacataaaaatatcagtgagccacgaaggtcattttcaaacttctaaagaattgaggccaggcacagtggttcatgcctgtaatcccaggacttcgggaggccgaggcgggtggatcacttgaggtcaggagttcgagaccagcctggccaacatagtgaaaccccctctctcctaaaaacacaaaaattaggtgtgatggcaggtgcctataatcccatctacttgggaggctgaggcaggagaatcacttgaacctaggaggcagaagttgcagtgagccgagattgcaccactgtactctagcctggatgacagagtgagactctgtctcaaaaagataaataaataagaattgatgggggcatggagccaagatagccgaataggaacagctccggtctacagctcccagcgtgagcaacgcagaagacgggtgatttctgcatttccatctgaggtaccaggttcatctcactagggagtgccagacagtgggcgcaggacagtgggtgcagcacaccgtgcatgagccgaagcagggcaaggcattgcctcactcgggaagcacaaggggtcagggagttccctttcctagtcaaagaaaggggtgacagacggcacctggaaaattgggtcactcccaccctaatactgcgcttttccaacgggcttaaaaaacggtgcaccaggagattatatcccgcacctggctcggagggtcctacgcccacagagtctcactgatggctagcacagcagtctgagatcaaactgcaaggcggcagcgaggctgggggaggggcgcctgccattgcccaggcttgattaggtaaacaaagcagccaggaagctcgaactgggtggagcccaccacagctcaaggaggcctgcctgcctctgtaggctccacctctgggggcagggcacagacagacaaaaagacagcagtaacctctgcagacttaaatgtccctatctgacagctttgaagagagttgtggttctcccagcacacagctggagatctgagaatgggcagactgcctcctcaaatgggtccctgaccccccagcagcctaactgggaggcaaccccccagtaggggcagactgacacctcacatggccgggtactcctctgagacaaaaattccagaggaacaatcaggcagcagcatttgcaggtcaccaaaatccgctgttctacagccactgctgttctgcagccactgctgctgacacccaggcaaaaagggtctggagtagacctctagaaaactccagcagacctgcagctgagggtcctgtctgttagaaggaaaactaacaaacagaaaggacatccacaccaaaaacccatctgtacatcaccatcatcaaagaccaaaagtagataaaccacaaagatggggaaaaaacagagcagaaaaactggaaactctaaaaagcagagtgcctctcctcttccaaaggaatgcagctccctcaccagcaatggaacaaagctggacagagaatgactttgacgagttgagagaagaaggcttcagacggtccaactactccgagctacaggaggaaattcaaaccaatggcaaagaagttagaaactttgaaaaaaaattagacaaatggataactacaataaccaatgcagagaagtccttaaaggagctgatggagctgaaagccaaggctcgagaactacgtgaagaatgcagaagcctcaggagccgatgcgatcaactggaagaaacggtatcagtaatggaagatgaaatgaatgaaatgaagcgagaagggaagtttagagaaaaaagaataaaaagaaatgaacaaagcctccaagaaatatgggactatgtgaaaagaccaaatctacgtctgattggtgtacctgaaagtaacggggagaatggaaccaagttggaaaacactctgcagggtattatccaggagaacttccccaatctagcaaggcaggccaatattcagattcaggaaatacagagaatgccacaaagatactcctcgagaagggcaactccaagacacataattgtcagattcaccaaagttgaaatgaaggaaaaaatgctaagggcagccagagagaaaggctgggttacccacaaagggaagccggtcagactaacagcggatctcttggcagaaactctacaagccagaagagagtgggggccaacattcagcattcttaaagaaaagaattttcaacccagaatttcgtacccacccaagctaagcttcataagtgaaggagaaataaaatactttacagacaagcaaatgctgagagattttgtcaccaccaggcctgccctaaaagagctcctgaaggaagcactaaacatggaaaggaacaaccggtaccagccactgcaaaaacatgccaaaatgtaaagaccatcaaggctaggaagaaactgcatcaactaacgagcaaaataaccagctaacatcataatgacaggaccaaattcacacataacaatattaactttaaatgtaaatgggctaaatgctgcaattaaaagacacagactggcaaattggataaagagtcaagacccatcagtgtgctgtattcaggaaacctatctcacatgcagagacactcataggctcaaaataaagggatggaggaagatctaccaagcaaatggaaaacaaaaaaaggcaggggttgcaatcctagtctctgataaaacagactttaaaccaacaaagatcaaaagagacaaggccattacataatggtaaagggatcaattcaacaagaaaagctaattatcctaaatatatatgcacccaataacaggagcacccagattcataaagcaagtccttagtgacctacaaagagacttagactcccacacaataataatgggagactttaacaccccactgtcaacattagacagatcaacaagacagaaagttaacaagaatacccaggaattgaactcagctctgcaccaagtggacctaatagacatctacagaactctccaccccaaatcaacagaacatacatttttttcagcaccacaccacacctattccaaaattgaccacatagttggaagtaaagcactcctcagcaaatgtaaaaggacagaaattataacaaactgtctctcagaccacagtgcaatcaaactagaactcaggattaagaatctcactcaaaacagctcaactacatggaaactgaacaacctgctcctgaatgactactgggtacataactaaatgaaggcagaaataaagatgttctttgaaaccaacgagaacaaagacacaacataccagaatctctgggacacattcaaagcagtgtgtagagggaaatttatagcactaaatgcccacaagagaaagcaggaaagatccaaaattgacaacctaacatcacaattaaaagaactagaaaagcaagagcaaacacattcaaaagctagcagaaggcaagaaataactaaaaccagagcagaactgaaggaaatagagacacaaaaaacccttcaaaaaattaatgaatccaggagctggttttttgaaaggatcaacaaaattgatagactgctagcaagacaaagaagaaaagagataagaatcaaatagacacaataaaaaatgataaaggggatatcaccaccgatcccacagaaatacaaactaccatcagagaatactacaaacacctctatgcaaataaactagaaaatctagaagaaatggataaattcctggacacatacaccctcccaagactaaaccaggaagaagttgaatctctgaatagaccaataacaggctctgaaattgtggcaataatcaatagcttaccaaccaaaaaaagtccaggaccagatggattcacagccgaattctaccagaggtacaaggaggagctggtaccattccttctgaaactattccaatcaatagaaaaagagggaatcctccctaactcattttatgaggccagcatcatcctgataccaaagcctggcagagacacaaccaaaaaagagaattttagaccaatatccttgatgaacattgatgcaaaaatcctcaataaaatactggcaaaccgaatccagcagcacatcaaaaagcttatccaccatgatcaagtgggcttcatccctgggatgcaaggctggttcaacattcgcaaatcaataaatgtaatccagcatataaacagaaccaaagacaaaaaccacgtgattatctcaatagatgcagaaaaggcctttgacaaaattcaacaacccttcatgctaaaaactctcaataaattaggtattgatgggacgtatctcaaaataataagagctatctatgacacacccacagccaatatcatactgaatgggcaaaaactggaagcattccctttgaaaactggcacaagacaggggtgccctctctcaccattcctattcaacatagtgttggaagttctggccagggcaattaggcaggagaaggaaataaaagatattcaattaggaaaagaggaagtcaaattgtccctgtttgcagatgacatgattgtatatctagataaccccattgtctcagcccaaaatctccttaagctgataagcaacttcagcaaagtctcaggatacaaaatcaatgtacaaaaatcacaagcattcttatacaccaataacagacagagagccaaatcatgagtgaactcccattcacaattgcttcaaagagaataaaatacctaggaatccaacttacaagggatgtgaaggacctcttcaaggagaactacaaaccactgctcaatgaaattaaagaggatacaaacaaatggaagaacattccatgctcatgggtaggaagaatcaatattgtgaaaatggccatactgcccaaggtaatttatagattcagtgccatccccatcaagctaccaatgactttcttcacagaattggaaaaaactaaagttcatatgaaaccaaaaaagagcctgcattgccaagtcaatcctaagccaaaagaacaaagctggaggcatcactctacctgacttcaaactatactacaaggctacagtaaccaaaacagcatggtactggtaccaaaacagagagatacatcaatggaacagaacagagccctcagaaataatgctgcatatctacaaccatctgatctttgacaaacctgacaaaaacaagcaatggggaaaggattccctatttaataaatggtcctgggaaaactggctagccatatgtagaaagctgaaactggatcccttccttacaccttatacaaaaattaattcaagatggattaaagacttacatgttagacctaaaaccataaaaaccctagaagaaaacctaggcaataacattcaggacataggcatgggcaaggacttaatgtctaaaacaccaaaagcaatggcaacaaaagccaaaattgacaaatgggatctaattaaactaaagagcttctgcacagcaaaagcaactaccatcagagtgaacaggcaacctacaaaatgggagaaaattttcgcaacctactcatctgacaaagggctaatatccagaatctacaatgaactcaaacaaatttacaagaaaaaaacaaccccatcaaaaagtgggcaaaggatataaacagacacttctcaaaagaagacatttatgcagccaaaagacacatgaaaaaatgctcatcatcactggccatcagagaaatgcaaatcaaaaccacaatgagataccatctcacaccagttagaatggcgatcattaaaaagtcaggaaacaacaggtgctggagaggatgtggagaaataggaacacttttacactgttggtgggactgtaaactagttcaaccattgtggaagtcagtgtggcgattccttaggaatctagaactagaaataccatttgacccagccatcgcattactgggtatatacccaaaggattataaatcatgctgctataaaggcacatgcacacgtatgtttattgtggcactattcacaatagcaaagacttggaaccaacccaaatgtccaacaacaatagactggattaagaaaatgtggcacatatacaccatggaatactatgtagccataaaaaatgatgagttcatgtcctttgtagggacatggatgaaactggaaaccatcattctcagcaaactattgcaaggacaaaaaaccaaacaccgcatgttctcactcataggtgggaattgaacaatgagaacacatggacacaggaaggggaacatcacactccggggactgttgtggggtggggggagcggggagggatagcattaggagatatacctaacgttaaaatgacgagttaatgggtgcagcacaccaacatggcacatgtatacatatgtaacaaacctgcacattgtgcacatgtaccctaaaacttaaagtgtaataataataaaattaaaaaaaaagaagaattgatatcaggccagccactgtgccttacacctgtaatcccagcactttgggaggttgaagtgggtggattgcttgaggccgggagtttgagaccagcttgggcaacatagtaagacctcacatctacaaaaaacttaatattagccatgcatggtggcacgtgcctgtggtcccagctacttgagaggctgaggtgggaggatcacttaagcacagggaggggtctgaggctgcagtgagccatgattgcaccaccacactccagcctgggcgacagcgagaccctgtctcaaaacgacgaacaaaaaccctaaatcaagacttgatatcataaaggtcacatactctaattacagtgcagtaaaattagaagtcaatacaaatgccacaaagacccatctatttacaactacatatcttaactttgaattgatatgaacttgatattaattcccaaaagaagtgaaaccaggaggatgggagttgattaatggaagggagatttagacacaaggtgaatactgtcaaatctttttatcagtcctccagaaattaatatagaaattccataaaatcagaatgcaagcagtacttttggaaccggacaaaataattctaagtgtatagggaatgctaaacagacaaggagaagtctgacgtgggagcgttagtcctgccagattttacaagaccaaagctataaacttttttttttttttttttttttttgagagacggagtctcgctctgtcacccaggctggagtgcaatggtgcaatctcggctcactgcaacctccgtcccccaggttcaagccattctcctgcctcagcctcctgagtagctgggattataggcgcccaccacgtccggctaatttttgtacttttagtagagacagggtttcaccatgttggccaggctggtcttgaactcctgactttaagtgatccacccacttcggccttccaaagtgctgggattacaggcgtgagccaccacgcctggcccatgtcattccatttagatgaaatgtcaagaaaaagcagttatagagacagaagtagattagtggttgcctggagctgcgggtgaaagcagggattaattaggcaatgaggaaactttttggggtgatggaaatgatctagaattggattgtgatgtttgtacagccttataaatttatgaaaataattgagttgtataattacaaagggtgagttttatatttgtaccttaattagaactgttaaaattgtgtttgtgtatactagcaataaactatcagaaactaaaaattaagcaacttttttttaacagtaccatttacaatagtatgaaaaatgaaattctttggaataaatttgacaaaagatgtgcaagaactatataccaaaaactactcaaaaaacttttttttacagaaaattaagccaggcccagtggctcacgcctgtaatcccaacactttgggaggctgaggcaggtggatcacttgaggccaggagtttaagaccaacctgggcaacatggtgaaaccctgtctctactaaaaatacaaaaattagccaggtgtgatggtatatgcctgtaatcccagctacttgggaggctgaggcatgagaatcgcttgaacctgggaggcagatgttgcagtgagccaggatcgtgtcactgcattccagcctgggtgacaaagcaagatcctgtctcaaaaaaaaaaaaaaaaaaacaccaacaaacaaaaaagttgttaaaacaagattaaagacctaaatagtccacccatggattggaagactcagtattttttttttttttggagacaaggtctcactctgtctcccaggctggagtgcagtgcagtggtgcaatctcagctcactgcagcctcgacctcctgggctcacacgatcctcccacctcagtctcctgagtagctgggaccacaggcatgtgccaccatgcctggctaagtctattgtactttttgtagacatggggtctcactatgttgcctaggctggtctctaacccatgggctcaagcagtcctccccctcggcctcccaaagtgctttgattacaggtgtgagccaccgtacccatgctggaagactcagtacttttaagacagcagagtcttcccccagttgatctatggattcaacccagtcctgatcaaaatcccaacagctttactatagaaactggcaagctgattgtaatattcatatgcaagtgggaaagctgccagaatgaaattggacccttatctcaccccttagacaagaaatctactcaaaatggatataagacttgaaactgtaaaattcctaggagaaaacaggcaagctctgtaacattggtctgggcaatgattttttgttgttgttgtttttgagacggagtatctcactgtgtcgcccaggctggagtgcactggtgcgatctcggctcactgcaacctctgcttcccgggtcaagcaattctcctgcctcagcctcctgagtagctggaattacaggcatctgccaccatgccccactaatttttgtatttttagtagagacagggtttcaccatgttggccagtttggtctcgaactcctgacctcatgtgatccacccacctcggcctcccaaagtgctgggattacaggcgtgagccactgcacctggccttgggtatatatttgaatgaattgaaatcatatgccagatacctgcactcctatgtacctctgggtatatatttgaatgaattgaaatccacatgtcaggtgtctgcactcccatgttcattacaacgttattcaccacagccaagacatggacacaacctaagtgtccatcacagatgaatgaataaaaataatgtaatagatacacaatggaatactattccgactctaaagagaatggaattctgtcatcttttgacaacagagatgactctagagaacattatgctaagtgaaataagccagacacagaaagacaaatatcccatgatctcccttatgtattatggagtcctaattagggaaaatgagtcaggctggtgggaccaagggaaagccaaaagagataagacagataagctacaagcccgcctttcttcatggtccaggacacatagcccccctgcacaaataacttacaagcttcctgtgcccagtgatcgccagtccctcagctaatagaaaaatgcagccgggcgcggtggctcacgcctgtaatcccagcactttgggaggccaaggcgggcggatcacgaggtcaggagatcaagaccatcctggcaaacacggtgaaaccccatctctactaaaaatacaaaaaaaaattagccgggcgtgatggcaggcacctgtagtcccagctactcaggaggctgaggcaggagaatggcgtgaacctgggaggtggagcttgcagtgagccgagatcatgccactgcactccagcctgggtgacagagcaagactccgtctcaaaaaaaaaaatagaaaaatgcaagttagctcactgcaaccttggcattatcagtactgcacgtacccctgtccagcacacagcacaagcaccatcctacaaaatccccagcaagcctttgtctctttgcagtcagttcctctcttgctgacctgctcattgcacccttgcaatgtattttcctactttctgtaataaatctgcctttcctgacctacagctgtcttggtaaattcttcttatccctgtaccaccagcccagatagttgtaatcatctgcaacatacatgaaatctaaaaattcaaacatagcaatagagagtagaatgctggttaccagaggctgaaggaagaggggcctgggatggcaaaaggggaaatgttggtcaaaggctacagagtttcagtatgatgggaggaataagctctggtgatctactgcacagcaaggtgactattgttagtaatagtgtatatttcaaaatagctagtggtttttttttttttttctgagacggagtcttgctctgttgcccaggctggagtgcagtggcgtgatcttggctcactgtaagctctgcctcctgggttcacgccattctccttcctcagcctcccaagtagctaggactacaggcgcccgccaccacgcacagctaatttttggtaattttagtagagatagggtttcaccatgttaggcaagatggtctcgatctcctgacctcgtgatctgcccgcctcggcctcccaaagtgctgggattacaggcgtgagccaccatgcccagccagtgaatttttaatgttctcagcataaagaagtatgtgaggtgatacatatgccattccacaatgtttacatgtattgaaacatcacactgtaccacatacatatatgcaattattgttgttattttttagaggcagggtcttactctgttacccaggcaggagtgcagtggtgtgatcgtggcccactgcagcctggaacttctgggcttctggaactacaggcatgggcctctacacccagctaatttttaaatttctttttgtagagacggagtctcaccatgtggcccagactagtctcgaactcctggcctcaagcaatcctcctgcctcagcccatataagcaattattatttgtcaatttaaaataaggcggccgggtgtggtggctcacacctgtaatcccaacactttgggaggctgaggcaggtggatcacgaggtcaggagttcaagaccagcttggccaagatggtgaaactccgtctctactaaaaatacaaaaattagccaggcatgatggcaggtgcctgtaatcccagctactccagaggctgaggcagaaaattgcttgaactagggaggcggagactgcagtgaggcgagatcacaccactgcactccagcctgggtgacagagcaagactccatctcaaaaataatataaggctgggcacgatagctcatgcctgtaattccagggctttgggaagtggaggcaggaggatcacttgagccaggagttcgaaatgggcctgggcaacatggtgaaaccccatcttgactaagaatacaaaagttagctgggtgtgatggcacgtgcctgtggtcccagctattccagaggctgaggagggaggattgcttgagcccaggaggtagaggctacagtgagccaagatcatgccagtgtgctccagcctgggcgacagagtgagaccttgcctcaaaattaattagttaattaaaatttaaatttaaaatttataaagaaatacaaaggatctagccaaaacgcttttgacaaagaatgaagttggaggcctagcactacatgtatttcggtttggctttagaagaatgattttatggtatttcattttttaacatacacagactttgtcaatttcactctgaaatatatccattcagaacactggacaactaagccaagacacgtgttcgaggatgttcactgcggcaacgttcatggaaaccacccacacccaggtgtgagtgaaggatttgttaagttatgctacatctgaaagtgtgatacaacacagctggtggcagtctctagaccagatgggtctaaaggattggcaaaccacagctgtttgggcaaataaagttttattggaacatgaccatggctgttcactcttgggtaccaaggcagagttgagaatctgtgacagaggtttatgcagcctgcgagcctggaatatttaccatctggccctttaagggaaagttagccaattctgggttatttattaatttgctaattagcaaattagtttgtatatattaacatggggaagatgttcaggaaatatcactatgtgaaaaatatcactaggtgaaaaggtaaaaagtgccacgtggaaaaccagtgcctcattcacgcggtgtcgcttcccttcgcctcagcatgggcagcttcccccccatgttgggaactagggccccctggagtggaaaggctgagattccaggcagccttgatcaattcccgtgtgcaggcccatccatgccttcctggccagtttgcggtgtgggttcaagctacatcccttctctggatttgggtctcctacttgtactggcgtgggtttcgcctggcagaaccctgaggattttagctgtgtgtcttcctcgggggtgatattgctttcgccgcccctgtccaccctgggagtgacggtgggggtcccctacctgcccgctgtgaagcaggtcccgttagcagcaccgatggttgaaaatgccacaaaaagtggaacgatccaagaagcaggatagagaacacggtcaccaaatgtctggtgagagaagcgagatgagtcctgagggtctttcttggcctccaagagcggccggcccccaaaagctattctggcctcccaggggacccagggacccacctcgcctcggggcacagcctctgactcctccactgcagaggagagaggagaacgccactcgcctatctccagatattgtgatggcaagagaagtctcttatctactactccctggcataaatctttatttatttatttatttatttatttatttatttctgagatggagctttgctcttattgcccaggctggagtgcaatgttgctgtctcggctcactgcaacctctgcctcccagggtcaagcgatgctcgtgcctcagcctcccaagtagctgggattacaggcgcatgccaccacattcagctaatttttgtatttttagtagagacgggatttcaccacgttggccaggctggtctcaatctcctgaccttgcgatccacccatctcggcctcccaaagtgctgggattacaggcatgagccaccatgcctggccaaatctttattttttaatttgattttttttggagacaggatcttgctctgtcgcccaggctggagtgtagtggcgtgatcacgtctcactgtagcctcaatctcctgggctcaagtgatccttgcctcagtcttctaagtagctgagaccacaggcactcgccaccacacccagctgcgtaattcttggtcatttcaatatcctgacaccttcacctctcacttccctgaacccccactccaaccggaatggctgaattctccctcccacctcagcagcccccagtcttgtggtcagtgacctcaacacttatccaaactgcgtctcctccaccttccaaatccccaacacgtggttgtctgtttgcaactgcaggaggcccccagccacctcttcactgaccccaatgcctctcacctctcaccttctatgattcattattatttagggtggtgcaaaagtaattgccagttttgccaaaaatatatatattttttaatatataatgacctaatataatgacctcccccgactccctggcactttctgcctctgcttcatgcttgcctgccgaaccctcaccctggctagcccggccctgcctccagctccatgccgtgcgtgcccagtccatgtccccgtccgtgaatatcgccctccttccctgggagggagctcacctccagtgctgacacctgccttaccccttcccacaagccacagcccccgccagcagcgatgcccgggcactcaccacagccaccgcctgggactgcaggagttcggtggcagtcatcacggtgaagtaggacacgttcatgaggatgtagcacgccgtcaccagggggatcccgatgataatggccaaaggcaggtttctgggaggggcaatgacacggagacccacgttcagaccacagcctcccgcggaagatggacgccctccctgaggccctcccagggagaagattcgcaggtagcagaggcccagcaggaacataagacattttcaaatgagaatgctgcctctctcagactccagagcagttcacatggaactgtttataaagcaaaataagccagagataaaggaagaccaagctcttccctcccttaggagccactgctctgtcccaaaccaaaccaaactctaagcgtgcatagtgagctcataagaaaccattcgctggccgggtgcagtggctcacacctgtaatcccagcactttgggaggccgagatgggcgaatctcttgaggttgggagttcaagaccagcctggccaacatggcaaaatctcatctctactaaaaaaatacaaaaatgagtgagctgagattgcaccactgcactccagcctaggcaacagagcaagactctgtctcaaaaaaaaaaaaaaagaaataattcactgtcgggaagggcatcatggaatacccagggaaatagctccagccttcaccaggagaagagaaatcaggctgcccggctactgtcctctgcactgattcagctgttacctgtaagggtttctaagttcttctgtgatgtaattgagttgattcctggaaaaaggaaagtaacaagcgtcacacaccttgactttctttttcgataatgaaacccacaataataaatgttggcctcatttaagattctctaccagagaaaaaaattctcctgcaggaattccaggtgaatttttttccaggtgaatggccctgctagtggtggggcctggggccctacccagacctacacatctgtcagctggttgagcctttgccctcctcgggaatcacacggattttcaagaataatcaggagtagtgagtccccagggtgctttgaaaaaatggaatattctttgtctgaaaagggaattaaatctataaatgctttgcaggagagaaggaccatcgttgcagatggccatgcttcttccttaaaggacaaaaatgggccaggcatagtggcgcacgtctgtaatcccagcactttgagaagccgaggtgggcagatcacttgaagtcaggagttcaagactagcctggccaacatggtaaaacctcgtctctactaaaaatacaaaaattagccctgcatggtggcaggtgcctgtaatcccagctagtcgggaggctgaggcaggagaattgcttgaacctgggggattcaagcaattgcagtgagccgagatctcaccacagcactccagcctgggtaatagagtgagactccgtctcaaaaaaaaaagaaaaaaaaggacaaaaacagaatctcatccactaaactcgataaatatataaaatttatatggtattatttatttttgtagggcagtcccccaaaccataatagattcagagaggctcccaaacctaatgattttcaaggttaaatagaagtgctattgagtattctttgtttaatcaagagcttggggctgggcgcagtggctcacgcctgtaaacccagcactttgggaggccgaggagagagaattgcttgagtgtaggagtttgagagcagcttgggcaacacagagagactgtctctacaaagcataaaaataaaaaattatcagggcatggcagctcctatctgtagtcccagctactcaggaggctgaggcgggaagctgacttgagcccaggagctcaaggctgcagtgagctatgatcacgccattgcactccagcctgggtgaccaagtgagatcctgtcttaaaaaaacaaaacaaaacaaaacagaaaacctgagcttgggccctggctgcctctgatttggctgagcctgtgttggcccagtgagggttctacacagagcactctggctgactgagcaggtgtctcagggaataaaggggagaggttgtcgcatccttcacaaaaaggaaatgtgagggtgaatgtcagagtcacaccaaaccccagaaaggagaactcattgttttccatgacaggtggagttaaagtcacctggagaaccccacccacccccagactcgggacatctcaggacacctcaccatccatcataggcccagagtccattgtaaaacgccaggctgatggctcccacagacagctgggcgccctcgaaagaattatcaaaattctttgtgtttcctgtaatgaagccagacagtgaacggcgggtgtcaaccgggcagatcttgagtgtatctccacgggaaagatgggcatgattgtgaccccagcttaataaacacgccctgaaactaaggatccctcccaccgagttcctgccatgcttccttggagatgggctcgtggggcaaggctgctcctgctcccagtggaagggcgtttggtgtgtgcccgtgcagggcccaccctcccgtgggtcaccttgggccaggagcaccagcccgctgatgatgatgatggccacgatcaccagcttggccgcggtgaagatgttctggacgtagcttcccagccgcacgctcagtgagttcactgtcgagatgaacactggaagggtggggacagtttctgcatttatggttttcagcaaagccctggagagagtctcctttcttttatatattttttatttttttttttttttgagatggagtctcactctgtcacccaggctggagagcagtggcatgatctcagctcacgatctcagcaatctttgcctccccggttcaagcaattctcctgcctcagcctcctgagtagctaggacgacaggtgcacgccactatgcccagctaatttttgtatttttagtagagagcttgtctggaggttctagcgggggagcgcagctactcatatacccttgaccgaagaccagccctcctctatcggggatggtcatccttttccaccgagtgcgcagcttcgggagggatgcacgtggagcagtgagggaggaagaggacactggcctagccagccagatcacctgaatcaaccctggcgatcagtggggtgacagatgtccctgccagatcgccctcatatccaatttttgtaattttatttttatctatttatttatttgagatggagtctcactctgtcgtccaggctggagtgcaatggcacagtctcagctaaatgcaacctccacctcccgggttcaaggaattctcctgcctcagtctccccagtagctgggattacaggcatgcactaccccaccacccccctcccccgccctgctaatttttgtattttagtagaaacagggttttgccacgttggccaggctggtctcgaactcgtgacctcatgtaatccctccaccttggtctcccaaagtgctaggattacaggtgtgggccactgcacctagcctcttttattttttgagatagggtccaaggctcaagtgatcccccctcctcagcctcccacgtagctgggacgccaggtgcatgccaccatacccggctaatgttttgattgtttgtagagtcaaggttctcactgtgttgaccaggctgatctcaaactcttggcctcaagcgatcctcccacctcagcctcccaaagtggtgagattccaagcatgagccactgcctgcggcccacccctactcccccaccagccaccatatcatctcccaaattccaagagggcagatccaaacatgggagtttaaggaccttttaaaagaacctggagatgaccttagccgggctgcctcagatggcgaaaaattatcagggcgtggtaagcagcctcccgagtagctgggattacaggcacctgccaccacgccaggagaagctgggccctgagccaaggctctgccctgcaggacagccagcggcacccctccctgcagcccccacgggcctgggggtccccagtgtgcagcacccacaggtactgcaaaggctgatgccaggccctgcctgggctctcaccagagactcactggggaggagctgagggcggagtccccagacaccctctgtgccaggtcttttctgacccctgccctgggctcaggtactcacagatggcggcggcggccaggcatttcacaacgatttgaggaggcttgcagcccacatagaagggcgcacacacatactcggagaagctgaggcagatgatggcgaaggacgtgggcttaatgacgatcaggctggcccaggagaagaggtaggcggggatgggcccgtaggcctccatcaggtagggatactctccccctgacttggtgatcattgtgccaagctccgcaaagcacagggcacctggaacacagagaggaagggcccacaggccccttgtgaggcactgccccggccccagggagccttcctcccaccggaggctgcgctcgtatggaggggcccaccgtggtccgccctcgctggacggccctgagctccagcgttggacattcagtccagcctgatttacacctgtttgccatacatgtgccaagagggatactggcagggtgagggctggcacaggtagcagctgcctggcgtgcccctgcatgcttccggggctgcaacaggctcccaagtctctttacccagcgtcgcgaggaccccgcaagccgcccatatgatgaggcagggccccacagcttccgtgttgctgagcacagacttgggggaaacgaagatcccagagccaatgatggtgcccacgatgatggagatgccactgatgaggcccagctgggtgtggaggaaggaagagggcgttagtgccacgcccggacccagcccagaaggccaggtgccaccctccctcggtacggccagggcggccccagccaaagcccatgtcccaggcgcttccaccctgagcggctgccctggcaacaccggggcaccgctcccggagctttgcttatgttaacgtgattaattatcgtgacagccccgcgagctggccacactgtgtcacccccatggacagaggaggacgctgaggcacagaaagattaggaggctgtccggggtttacagctagagagggggaaacctggctcaggttccacgtgcctaaccgtgatcctgtgccctcaatgaaaaggctgacttggcaacagctcaccaataagaaaggccctcgggatacgcctctgagcctagagtcctggccagaggctccatgcagggtgagcaacggaggcctcccagaaacagaaacatttgggcactctgaactttctgtggtgccattttcttttatcttatttttatttacttatttatttagagtcagatctctctctgtcacccaggctggagcacagaggtgagatcatggctcactgcagcctcgaactcctgggctcaaacaatcctcccaactcagcctcccaaagtgctgggattgcaggcgtaagccgccgtgcctggcccagtgccatttgctaggatgggagctttctgagaacagaacccagctcaaagagacaccagatggttccatgcctgtgaagttcaagaacaggtgaaactaatccacagccacaggaattcagggctggggccctgcctagaaaggggcacgagggagctttctggggtggtacatctgtcaaaactcaccaaactcagcactaaagagctgtacatttcgaccaggtgcagtggtttatgcctgtaatcccagcactttgggaggccgaggcaggcggatcacctgaggttgggagtgggagaccagcctggccagcatggagaaaccccgtttctactaaaaaatacaaaaatcagccaggcattttggtgcacacctgttcctagctacttaggaggctgaggcaggagaatctcttgaacccatgaggcagaggttgcagtgagccactacaatcactccagcctgggtgacagtgagactgtctcaaaaaaaaaaaaaaaaacctgcacattacactgtatgtaaattacacaccaatcaaggaggaaaaaaaagtccaactcaagccctactcataacactcgtcctcagaagcagccccggccagatctccagagcctgaagtttccagcacccatgttcacctgtctgggaagaagctgggcttggagtcagatcgcaggggatgaggggctcccagctgcaggctgccaccctgaggactctgcacacaccagtgggatccctggggagcagcgtctgctttcagggccagggcgcacttccaggacagggcggggatgggctcagctctcctcctcatctcagccctgcccaggactggcagtttggctccagaatcctccctcctgctgagggactgcctgggttctgatgtgggtgaggtctgcattcgccctgaagctgcctgactgaggagtagacccagctcagatttttggtttttagagtcagggtctcgctctgtcacccaggcttggagtgcaatggcgcgatcatgactcactgcagcctcgatctcctgggctcaagggatcctcccacctcagcctcccaaagtgctaaggttacaggcgtgtgccgccacacctgtccccagctcagaagacacatcttggggatttctcagctgtgctctgtggccactggggcccaccagggttctaagaggcccttcctgagatcaggcctgagactggcagagagggaaagtgctgcagcccatcgtctacctcctgggggtcccaggccaagccattcaggccattgccagccctccggtcaagccctaaagccttggtgccgtccctcctccatcccctctgctgccaggcatgggagctctcggaggccctgcccacacctctgccctggaagcggaagccatcctgagctcacctggagctgcctttcctcatcctaggagcctgaagccctccctgcgcctccatgctcagcacctgctgctcccaactgcctgggactggcgcagtgtgctgtgttgagctcctttctgccttccccccagccccaagctccctttccctgcaggcccagggccagccccagctgctcactgcagcccaactcagagcagctgtccctggtagatgcctctaagacagaacaggctatgctgggggcagtacttcccatcactacagccattcagatataaggaggacaggcatttagaggggactcaaccatcagaacgccctctctggctgggcacagcgactcacgcctataatcccagcactttgggagcctgaggtgggaggatcgcttgagcccgggagttccagaccagcctgggcaacacagcaagatactgactctacagaaagaatttttttgaaaagttaaaaatttggcagagcatggtggtgtgctcctgtagtcccagctactcaggaggctgaggcaggaggattgcttgagtccaggaggttgacgctgcagtgagctatgattgcaccactgcactccagcctgggtgacagagtaagaccctgactctaaaaaaatttttttaaaaatttttaaaaagaacgccctttctgaccattcctggaaaggccattagtttgaacaaaaatactggcccgtctagacacttgctcaacacacaaaagcacctatttatgaacttaaaataatatgcgggccgggcaagttggctcatgcctgtaatcccaacactttgggaggccgaggtgggcggatcacttgaggccaggaattggagaccagcctggccaatatggtgaaacctcgtctctactgaaaatacaaaaattagccaggcgtagtggcacatgcctgtagtcccagctactcaggagctgcttgaacccaggaagcggaggttgcagtgagctgagatcataccactgcactccagcctgggtgacagagcaagactctgtctcaaaaaaaaaaaaaaaaaaaaaaaagaatatgcagccgagtgcagtggcacacgcctgtaatcccagcactttgggaggatcacctgaggccaagagtctgagaccagcctggccaacatggtgaaaccctgtctctactaaaaatacaaaaattagccgggtatggtggcgggtgcttgtaatcccagctactcgggaggctgagtcagaagaatcccttgaaccggggaggtgaaggttgcattgagccgagatggcagcactgcactctagcctgggtgacagagcaacactccatctcaaaaaaaaaaaaaaaaaaaagaagatgcagaattccctggcgagagggaaagagaagtaagtccagagattatccctttaaagatgtacttcacaaatcaaagagtacatcttctgccgtgtcactagggatcggcccggatttcactgcctgcgcccctcgttcagacgcccttgcctaacctgcaaagggcctgccccaccagagaccgccttacctccttttggagactggtggtcttaggctcttggctctggatcgacttctcatcctctctccgctttctcaggccagtatcccccatgtttcctcctgctggttccaggagactgcaaggagggcgcacagctaaatcttggttcagcagcagcagacaagacgcaagtgcaagctcggcctggactaggggagctggctgcaaaagcacagtgttggttattgctgcaggtgggggccgctgccagtccctcagggctcatgcgctgggccccagagtcaaagtcagtcattaacattgtccaggcaggggaacacagctccccgctgctctccaaagctcagctgcttgcttagctctctcccagacaggccccgggagcctcctggcccacgtgcctgtgccttgaaagtcattctacctctatggtcaacttcattttttttcaaaagtaaaaagaaatatttaacaacatcccgggctgggcacagtggctcaggtctgtaatcccagcactttcggaggccgaggtgggtggatcacttgagcccaggagtttgagaccagcctggctaacatggcgaaccccgtctctactaaaaatgcaaaaaaaaaaaaaaaaaaattagctgggtgtggtggtgggtgcctgttaatcccagctactcgggaggctgaggcaagagaagcacttgaaccctggaggcagaggctgcagtgagccaagatcatgccactgcactccagcctgggccacagagcgagattctgtttcaaaaaatatatatataaaaaattaaaaaatgaaaatattgtggaatgtatttatcagaatcaagtccaggtaaggagtgtctgtcttataattccttcccaagattaaaggcactcccatacatcacagatccacaatacaggtactttttctttgtactttttaaatttttacaatattttttataaagacgggagtgttgctatttgccccggctggcctcaagcagtccttccacctcggcctcccaaagggctgggatttcaggggtgagccaccacgcctggccaggtactttttcattgagtgatgaaaggaaagaaaacattgccgaggaaacccagttccagactgaactaggagaaaaccatgcactcctgtaccctctctctaaataaattatctgtccaggccccggccaggagagccatgagcctttctatcacctactgaccttacttaccttcctccgtgaccctgcagagccggaggagctgcggcccagctgaccgcccgtgcctgcacggtccaaccctagaaatggccatgtcttgtgcccaggagcaaaggaagtccagaaggtacagaggtcaataagggtaattattaaacacctttttttttttttttgcaatgaagcttagatacgccacacaaaaaaggggagggtcaggaacaccaatttctctccaaaaccgtttttgttttgttcatttgtgtctaggtcagattatttttttaaaaccagatggtcccaaatcgtctacactttttacctaaagataaaataaattatgccttcttttatctttgggaatcagaggagataaactttggaaccaattcgctaattgccttaataggctatatttaaaacccaagtcaggcagctcaaacaggaaccgctgtgtgtgcgtaactcagctgttggtcagtttcctccccgcccaggaatttcccccaagccaagggcctgcctctggctgagcaggtgagagcggctgagcccgtcccactcctctttaccagtgatggggcttcaccacttggaatcacaagcaggcctgaggcaatgcagggcctcgtgtcctccctgcagctgcggccaaatgcccatcaggtttggctgtggtgctgttcacgtagccatgtcctggctcatcacaagggacacaaaaccttccccttcggggaaacggagggggacaggcaacacaaggccaggaagctccggtccgcatccagggctgccagggtctggatctctctgggagggagcagaggttctcccgcactgcgattggacctaggctcaggcggcagcctcaggggtcagcacgaagccctttcagatagggaaggaagcaccttatgagaccttatgagacagcctggcacagcataagcactgcatctgaagcatcgtagctgttaccttcagccaaaactctggtagctttgccttgggccaaacttaactgcatcccagatatcagatggaagcaaaggtcagggatggaaggagctgggccagtctctgggggtcagtttgggagcagtttggggcaagcagacctgagagaggcacaggtttctctgaaagccgtctgcagagcacagggacccttgttgtcccagaggcacggtcctgatttagaagttcgtcacctcccatcttgggagggcccacctgtttacctgcctgccatgcccagagccctgagcagagaggctagtggcaggtcctgccaccctagacagaacctgcccaccggcttgctggggtcactcctcctaatgttgcagcactcatcatagtacctggcacatccatgtttgcaaaacaccacagaataccccctgggtcaaaagtgctcctggcaggctgacaggagaccacgtgaggacatcagggtggggcagtggtcccccgctggggccagacagccctgcaacctcacccactacccacatgggctcaggcagcactgccaggatcagggtctgaacctgcgacgcagggcgagcaacaggcgcctcctcacggaacacactgaacttgcatgttccatgaatgtccgggaccagccctctggtcttcctgggcctcttccaagtgccgagtctggaacatcgggatgtgagggtcctttgttaagtcagaaacctccacttcagttcattttgggtccacggtgagcatttcttaagcctgtttcttaaagttgtgtttttcaccgcagtcccaccctctccctcccttgaatacacagaaagtattcaagtaattctcataagctcttcctcatggaaaataatacggatttcatttaaaaagcaaaattttcctcagttcttgaagaccattggttcattgtgtatccagtgcttctgccatgtgactgaagtttcacctccctgctgtcaatttttttttttttagatggagcctcactctgtcgcccaggctggagtgcagtggcacgatctcagctcactgcaacctctgcctcctgggttcaagtgattctcctgtctcagcctcctgagtagctgggattacaggcatccaccaccatgcctggctaatttttgtatttttagtagagatggggtttcaccatgttggccaggttggtcttgaactcctgacctcaagtgatccacctgcctcggcctcccaaagcgcaaatcctactgtcatttttaccattttatttatttatttttgagacttgctgtgtcacccaggctggagtgcagtgtcatgatctcagctcactgcaacctccgcctcccaggttcaagcgattctcctccctcagcctcccgagtagctggtactacatgtgtgacaatatacccggctaatttttgtatttttagtagagacagggtttcatcatgttggccaggctgatcttgaactcctgacctcaagtaatccacccgcttcagcctcccaaagtgctgggattacaggtgtgagccaccacacccgcccaaccactctatttcttaagtttctgctaaagactcttgaccttcattttcaacccgtgctttttcccttccgattgcaaaaatgcttgcagtgtgaagatcttcacaccatctacattttatcttatatttggtgcacatttgatttcagttggggagggtaaaatgcttctctccacccttttgggttctttggttgggcttcgaattgagactaatgggaggaaaactgttttaattatgtgtatatgcaactgagtcccacaaaacaagagacttgaagaagggccagatgactaaaccctatatagcatcctgagctatataaggattaggggcttggggcttctggggcaggtagggactagtaatgggatggtgaggggaggaaatgcatggcgaataaaggtcgtcttgttatgcagatataagtctctcaggtaataaaagttgtctcttcctggtacagatacttgtactaatgtagatttccttcatgacatacatttcttttgcaaagggcagcttttcagagctacacctgttgtgtctgcagtttctcagaataaccagctcaaaatattccaaagaagtataatttggggtgatatatatctagtctcctacagtcatattttgggggtggtgtgtcctgagccccaacatttccttctcctgtgatggtttgtgtctgagacagggtctcttgctcccatgctagagtgcaatggcgtgatcatggctcactccagccttgacctcttgggctcaagtgatcctcccatttcagcctctcaaagtgctgagattacaggcgtaagccattgcacctggcctcctgtgatggttttaaagacgtctttaatcccatagtgtcagtccatttctgcacagcctctgggctgcccagctgggtgccttgttctctaattcactgtcctcgtgacagaggcaaggtcttgggcaaacattcaggcagaggctgaatcttcctttaccgctgaaagcttgttccagacctgccttcaagttttcaccttctcctattcattaagttcactcggtcttgtattccttcccactgctgctgacggtagcagttggggatttggagggggacccaaaagacagaaataactggcatactaccacagatagaagagttgtttgttcccttactacctgaattccaaccagaagaacttgtgatgagttagcgatgtgcaaagcctttcgatgtcagggacgtgctgtctagccataaaacaattagcaaggaaagcataaacataatttcaaaactcttatctaggaacaatctatatatatccaacaactattggaatagtacaattctgccttcgaactttgtccatcatttttatgtgttccaagtaatatggttttgcattaaataacctgcgtggggaagacagttgcagcatgctgtcaaaacacgacttcccatcctgctcccttccccaccgacctcgtcacgattcatggtcgctgcctcttttctcaaccacggtggccacacatgatgaaagttgtgatcgctgctgattttggggaaagagggttctgtgtcatcaaacatctttaataaagagttactattttgggggccgggtgctgtggctgtgcgcctgtaatctcagcactttgtgaggccgaggcagggagactgtttgaggccaggagtttgagaccaacctgggcaacatagcgagcgcctgtctttacgaaaagaatttaaaaatattatccaggcatgatggtgtgcacctatagtcccagctactcttgggaggctggggcaggaggactgcttgagtccaggagttcaaggctgcagtgagctacgatcgtgccactggactccagtctgggtgacagatggagactctaacataggaagttaccattttttgtaatcttgtttctgtctgcccagcatccacaacttggggggaactgtccctttctgtgggacactggtgggctaccaaccaaaagacctcacttctctggccacacaggagggctcaggatgtcaggtcagccaagaggccattgtctcccaggatttgctacctgagtgaagcacagggtaggctgacggtgttcaactactgagaccctcaccccaaggctattccagcttctgtccttctcaaaacatggtggaagccacagagtgtacatttccaaaatatttccttctttcccttaacattgggcagtatagttctgttgcttgcaacccagccctggtatgctacatatactacacacagacccttcactttcaaagaattattctttaataaaatactcaggaccctcctgaccaggtgaaatagatgctccaggctcctgatgacccaaggcagcaatgctgtcacctcagtgcactctccctgtctcatctataccctctgtagagtgctgacacacgggtggactgtggaacaaggggatggcggcccagagcacccagcacagacgcggggagccagcctgggtcctcagtagcaggtggcatgcccagttccaggaagcagcctcatgcgctccgtaggtttgaagtctccatagcccagcctgggtcctcactacctctgtcctgttgtttgcagacattgggcctgcaaagcagcccagcggggccctgcaggtgaatatcaactacaaaagccgcccttcttctttctctccaaaaccctcctacccagtccacccctagtcaaaaatgaggaaaagagccgagcctgaggctggggatggtggctcatgcctgtaatcccagcaccttgggaggctgaggtgggcggatcacttgaggtcaggagtttgagactagcctggccaacgtggcaaaaccctgtctctactaaaaataaaaaaaattagatgggcgtggtgagacacaccctgtaatcccagctattcggggggctgaggtgggagaattgcttgaacctaggaggtggaggttgcagtgagccgagatcgcaccactgcactccagcctgggtgacagagcgagactgtctcaactaaaaaaaaaaaaaaagccaagcctgggaggctggaagggcagcaggtttcctgcccagctttggggccatggactcacaccttgagaaaaccaagagaggcctaacaagctgtacccatcccctctcccactcctggctgcagccactccttacctgtggacccctgcccagctgtgacccagcagagaggtgccacaaacctgggcacactgagccctccccatgccgcccagccaagttttgagtggatgatgtttccagtcttactcaagaattcagatgtcagcccagccccatcccaagaggctcagcctcctgctgtgggatctgtatccggctcaagccctccctgctggaagagctgcttgggcccagggagggctctcctgagccacccacactggggactgtgcctttcattcccgccaacgatacaggtaggggagggggtgaggagccagtgacagctgcgctcgaggctaaatgctaggccaccctcggccttaaatctctgtcctctcaacacagttattgacaacaccaccaagcattgatgaggatgcggagcaaccggaacttgcgcggaggttggtggtgggaaagtaaaatgacacaaacactcaggaagcaggcctgggtgttatttcttttttaattgtctatataacaaaatccactgttgtcactgttttccagcatacagttcagtggcgttaagggcattcaggacagctctcatgacagactcacacccacatgcacacctggtgccccagcctgctttgtccactgtctccatttccccagggctgcttttactttttattgtattatttttgaggcagggtctcacctggttgcccaggctggagtgcagtggcatgatcatagctcactgcagcctcaacctcccaggctcaagtgatcctcccacctcagcctcctgagtagctgaaaccataggcgccatcaccatgcccagggctgcttttaaataatggcaaagccagcaaggctcactcgcgtgcctgggtcatgttctacagctgcttgaccaggaatcttccaatgccgtatgaaacctcaccaggaccaagaaagagaagggttccctgctcagaccagacacttgcagcatggggaaggaggagcccctcccagcagacccagttctcctctgtgcagtccggcctcatttcccacccaagctctgaccaaaccccctcctgctgctctgagtgcctgctgtgctcctgggggccctctccacccttctgtagctcctgaaaccttgtccactctgcaagggccggggcgtgccagttcctcccagaagcaccccaatgtttctgtcctttcctggaatctcacaagcacccaggtgcctctctgccttgcctgccccgccctccttggcatcctggactcgtggcttctctgcccatttcctatggcacccagcaggaggctgggcagaagatagtgtctgtgggacacctgcccttgccctggtcacagtgccatccaggagtccccatacttgcaaagtatgtttgcactgtgtgaaaaacttaaagcagaaacataagaacaaaagtggacacttctcaaaagaataaaatgtttgcataaaaggcagaaagacagggatgtcaacagtggttctctaggtcacgatggcgggagcagcattcctgctgacaagcactcctgccccgcgcagccacgctgggctgccgccgcctgtcagcctgtctacaggaggctgcagagcggccgtaaatgcctttgaaatagcatcacagttatttgttaggtcatctcctagggagatgatacacagttttcaatcccagtgagtctttctaccgcttgtaaaataaaattaaattacaatgattcaactgttgaacaagcttatagagtcataaaagaactatgattttctatctcacccttccgtctggcaatcaaagatcacacgtagaacttctacacatgaccaaggaccagtactggggcctccttcccacctgaaacaaggcaggacttcactgcgaggggctctgaaaaggagatgctgcagggtgccacccctgagtcccacagttagggtcctttgtagcccaatgtccccaagtccctccagcatgcctgggactgaatggtcctgagcggctggggtaattttcctgaggaggtggcacgtcatctaacacacatgggacagaaccatggccccctggtatgcttcttggtggtggcagtggggcagggactctatcttagctcaaagccagggctctcattacatgggtggggagctgtgtggctccagaatcaattaccttcccagaccaggcgcggtggctcatacctataatcccaacactttgggaggcctaggcaggaggattgcttgaagctagacgtttgagaccagcttgggcaacatagcaagaccccatctctaccaaaaaaaaaattttttttttttgagacaaagtctcgctcttgttgcccaggctgcccaggctggggtataatggcgtgatcttggttcactgcaacctccgccttccaggttcaagcaattctcctgcctcagcctcccaagtagctgggattacaggcacccaccaccatgcccagctaatttttgtatttttagtagagatggggtttcaccatgttggccaggctggtctcgaactcctggcctcgggtgatccgcctgcctcgacctcccaaagtgctgggattacaggagtgagccaccatggctggcctacaaaaattttttttttacaaaattagccaggcatgttagtgtatacctgtcatctcacctactcaggaggctgggatgggaggatcgcttgagcctggaggtcaaggctgtggtgattgcaccactgcattccagcctgggtaacagagtgagaccctgtctcaaaacaaacaaacaaaagtaacaactaaacaaaagagaataaagtacttgctcaggaggatagagaagggctaggggagagggcagaaaaggtttgtacaacttagagggcatgaacagcagcagcaccttgttttttttgaccaaacaagaaaaggcccccagagctcacgcacagctatcatcagggccggtgccatggcctggctcctcgggtgacacttccccatctgacacatggcacgagggctcagctgcccgcccaacccttccagcacttcccagctgcagatctaggagctggaaggcaggcctgctcagcaggccacctactcaccagagcagtgggtgtcatagaactcatctcagtggcaatgtggccagagaacatgccctggctaaaacagatttcagcagcacgttattaaaataaagcacaatgggccaggcgcagtggctcacacgtgtcattcccgcactttgggaggccaaggcaggaggacagattgaggccaggagttcaagaccagcctgagcaacatagcaagacctcatctcaacaaaaaagaaaaaaattagctgggcctgacagtgcacacctgaggtcccagctactcaggaggctgaagcagaaggatctcaaacatgtttgaggctgccgtgagctatgattgcaccactgtactccagcatgggcaacagagtgagaccctagctctaaaaaaaaaaaaaaattaaaaaataaagcaaaatgttatcaatggattaaactatgagaccatttatttcttccctgccctgcagcgttcagtgggcttacgcacctccggctgccaccatgggctgccctgcagggaaggcctgtgtgaggcagacctttcaggccagaggaggctacaccacgggctcccgcagattctagcaggtgggggcatgagacttcaggtcataggagcagacatcgcagccgtccagcaggtctgcctgagagacgccattgaggctgggggcaaccagagctctggggttgtcctgcacgcctgtcctcgtgagtgtgtcctggagaagttctcggattcttcggttttccctgaaggtagattcccaaataacttcaagttcaccttccatttctctgagggaaataagtttaaaatggcacaattttaaaaataatatagagcccatatgaatcccaaagtagcaagaactcaaaacagaagaacgctatcagcagggaacagagccctcggtgcctgggttctgaagcaagcgctcagtgtggaatgaagcagctggtgccctgggaatggggagcagcaggacagcccaggctggggctcagtgtggaatgaagcggccagtgccctgggaatggggagcagcaggacggcacaggcatttctcttccctctatgttctgcccttgactttggcgccagtgcaatccctgttttctctcaagaatgaacttgggcgtgtcgaataaggaactgcaggaactgcagggctggccttggccagccagacgctctagcacgatggcctggccacaggcacccacacagcccctcctgtgtcccgtctgcttgtccactgtgacctggccagcactcagtgaccttccacaggtcttccgctccatacagcccagagctaagagcgagtcagggggtgaggtgggggacctgaggagataagactcattgccaagatggagaagattggcctggcccatgtgccgggatggggaggccctgaggggccgaggcatgtgaggttggaaagagccacagggcagcgtttccagaaccaggatgcagtgccctgtggtgtgctggggagacaggacagatgaaggtggccacatcctcacagggccacagtccactgggaatagaccaggacacgagccacacctcacaaggtgcttagccccatcggggagcatggccaggctggagaggccagctccttcccggacactgccagatggttctggaaaatgttggaaactggatttgcaggtggacttcgcaccacggtttaaagagcaggacactgaagttcagggaggccagtgatgtgcccacttggccagagtcacttttcttgtgaacgttccttccttccaaggcccctgatgcccactgtgtggtaagaacaacttaattaaactatgtctaaaaaagccccagcctgggcaacatgtgagacctcatctctacaaaaaacttaaaaattagctgggcccacgtggtggcatgcacctgtatttccagctactcgggaggctgaggcagaaggatgacttgagcccagaaatttgaggctgcagtgagctgagattgtgccactgtactttagcccaggcaacagagcaagaccttgtatttaaaaaaaaaaaaaaaaaaaaaattccccagactttggttttctgaagatatttggtaaattatagcaatcatgtttaaatgtatggctgaactcgaaagaacaggcagtctctaagggcagaaaaaatgaagcctaaactgaaaccaaagaggcagacaaagtatcagttgctttgaggacaaaagtcaatgccaaaccctggatgtttgtagactgagagatcgtgcagatcaagagtgacagaaaatctcaggacccactcttgtccaagtttctcttcctactagaggcactgtgaaggtaggtaagtggaggatgtgaaggaccctcaaagaaaggaggggtgggtgggagacctgcagatcttcaaaggaaacctgttctgaaaggccaggcatcacctggggactagagccaccggcctgctctcaaatggatctggagtgagtctacactgttccccatgagtggggatccccaggccctgactgcagtgaatgaagagtttaaaaaagttgggcacagtggctcatgcttgtaatccctgctacttgggaagctaaggcaggaggatggcttgagcccaggagtttgaggctgcagtaagctatgatcacaccactgcactccagcctgggcaacagagccagaccctgtctataagtagtaataataataataataatagaaataacagaaataaaatacctaatcaaaaattaataaaatctctcaagaaaatgaaacaaaactggctcatgcctataatcccagctatactcaggaggctgaggtgggagaaccgcttgaatccgggaggcggaggttgcagtgagccgagatcgtgccactgcactccagcctgggagacagagtgagatgctgtctcaaaaaataaaataaaaagaaaatgagacaaaataaaaatatcagtgagatggaaggcagcagaaaaaaagagaaaggcaattagaggtgtgcattgattccggaagtccagttcaaacaagaggaatttttaaaagaataaagaagatgaggagcaaataaaacttgagaccaatattacattcagatcagagtaaaatgtagaaacaaaattaaacaatggaacaaataaaacaggcccagagggttttagcagaaccctcaatcagacattcagacatctctgcgggccatggcgcagggcgcatgccccacctgttctgctgcagcgcctggtccagcacctcctgcttgtccttcagcacctggtgcaggtgccgcatctcctgccggtactgggctgtcttgccggcgaagtcctcctgctgctccagcagacggtgactgatgtcccccagcttcagtgctgcctgcttcttgtagccctggtcgggggaaggactctgtgaatgaggggacgctgccaggccagggtggacagtgcctcctggctgtgctccctacccactccttgtgtgtcagagcctttaaaatctagcaaccccggataagtttggtctgggattgcaagtctggatcataaaagtcataaaaagtgacaaaagaatttcaggtacaataaaaccaaattttaatgtatataaagcctagttctttatatgctataaataaatgaaaacataaaatatcaccattggaaacagcagttcatgcttctaatttcagcactattacaggctgaggcaggcggatcacttgaggtcaggagttcaagaccagcctggccaacatggtgaaaccctgtctctattaaaaatacaaaaattagccaggcgttgtagtgcatgcctgtagtcccagctacttgtgaggcagaggtgggaggataacttgaacctaggaggcggaggctgcagtgagtgtgatcacgccactgcactctagcctgggtgacacagtgagaccctgtctcaaaaaaaaaaaaaaaaaattaccatcacagaacaaactggatgttcttgcaaattaatctacaactgtattttttccaggacaactcttatccctgcatcaactggtaacctaagaactaatgctgccactggtcagcactgtttcaccttgacaagacagcctcattgaagaatccaacaagggctgtcactctctgtcaccaaacagacagctgagatgaaagcccgctatttactttccttctttcgtttttactgtatagtactgaaggttctgaattttcctgtgagcattttttttctttttttttgagacggcagagtcttgctctgtggcccaggctggagtgcagtggcgcaatatcagctcactgcaagctccgcctcccgggttcacatcattctcctgcctcagcctcctcagtagctgggattacaggtgcccaccaccacacctggttaatttttttgtattttttttaatagagatggggtttcaccatgttagccaggatggtctcaatctcctgacctcgcgatccgcctgcctcggcctcccaaagtgctgggattacaggcgtgagacaccgcgcccggccgagcatttctaaaattattgtcacagagagtctgacatgtagtcccacagactcatttttttataagaagctctgacactcagtttatacattctctctgacccaagaattgtttagtgcacagtttttacacttccaagtgaaataactttttgttttttgattttgcttattaatttctgtttttaatatttgtgaccaacaaatgctggccgggtgcggtggctcacgcctgtaatcccagcactttggaaagttgaggcgggcagatcacctgagttcaggagttcgagaccagcctggtcaggagttccagaccagcctggccaacatggtgaaaccctgtctctattaaaaatacaaaaatcagctgggcgtggtggcacatctgtaattctagctactggggaggctgaggcaggagaattgcttgaacctgggaggcagaggttgcagtgagccaagatcacgccactgtactccaacctgggcgacaaagtgagactctgtctaaaaacaaacaaacaaaaaacaaatgcctacattatttctactttagggatttattgaggctttctttgtagccaagcaatgatcaatttttgtgtcttttatatatatgtaaatataccctgttgattatgttgttaaatcttctattttcttattttgtttaacatcttgatcagtcttggattaagagaggtggattatagctcctattaccaagtttccatttttctttgtatttcctgtagtctacacttcataaatttgctgctgtgttatttagcgcatagatactcacaattactatagatgatgatgtagacaggatctcactatgttgcccaggctggagtgcagtggctgttaacagacctgatcattctgcactacagcctcgaactctcagactcaactcaagtgatcctcctgctcagcctcctctacagggacccacacacccagctcatactatatattattaactgtagtcttttagtattataaaaatctcccccttttttttggtgtcatttagtgcttttggtctgaattctatcttggcatatgttaagatttcgacctttactttctttgtgtttgcagaaatctgggttatctctacccatcctttcaatttaaatccttcatgaatactttgttttaggttggctcttgggtctagtgtggaatagcattttgctttatgagccaatccaaaaaatattgttttccctaataggtgaattaagctaatttacatttacctataggacacatttctttggtctcaattttgttattttatgtttggttgttttatgtacatatttttaaaagattttaaactaatatagtctttttctttgcttttttgctgttataattctaccatttaaaaaaattaaaacaattttttttagaaacaggatcctgctccatgctctgtccctcaggctggagtgcagtggtgtgatcatagctcactacagctttaaactcctgggctcaagatcctcctgcagagttgggagtacaggcgctggctatcaagcccggctaattttaaacttttttttagagatggggtctctatgttgcccaggctgatcttgaactcctggtctcaagcgatcctactacttcagcctcctgaggagctgggattataggcacgtgccactctgcccagctctaattccactatttaggaataaagctcgattcttgtagttggctttattcttacgcctttatattacatgttcttagtcccctgtttttagatcgtatccattggttccctaacaaaagtaacaatacattagctcatgacaacgttttcttcacttttcccctccttctgttcacctgcttaagtatgcttaagctcgtaccacttggtttttcagctttaatgatatcccttgactcttattacctacgaagaaatcagcaagtgcaatctactttctaccttccttccccctttgcccatcagtttccttggttgtattattactacattgtcagaaaacatttacatacaattctatcagccttattcccgctctaagtcttattttacagttaaatatattcttcgctcactacaagttaattttgccgaagtttccccaattaactcttggttggcaggactcattgttgagacagggtcttgctctgttgcccaggctagagtgcagaggcacgaacatagctcactgcagcctcaaactcctgggctcaatcaatcctcccacctcagcctcccgagtagctgggactacaggcatgtgccaccaagcctggctaattgctgtattttttgtagagactggggtctccctatgttgcccaggctggtctcagactcctgggctcaagtgatctgcctgccttggcctcccaaagtgcttggattacaggcatgagtcactgtgcctggccattttctttatcttaaagtcgtatgtcttggtgtcaattttctgggtccattctgtgtcagttttccctaggtacataatgtgccctttcaggacatagattcaagtcttcttttatttcagaaaggtttttatgagttacagtttagagcagaataagccactgttttggtttcttctttggaggctctagaagtcagtctcttagatctccatcactgtccaccgaatcctttgcacatctccatttccactttcctgtctgtctttctcggttctagctgcatatcccttattgcgctgttatgacatctgtctccatagaattcagactgcatttcttaaaccgcttctctgtcccttctatttcttccctgggtcatgtcagttccctcccacaccctcctaggccttgctgcctcttcctgaggtcctgtgtctgctctgtgacatttcttcctggctctgactgcctcctgaagtcctgtctctccagctatctccagctctctagccagctacctagtggttcactttggagtatagttttgatctcctttgcggcaacacttttcctggtaagttttcagcagtttccgtcagtaggaacttatgcttctatttttcttccttttccttaaactgcttttatatgaaggcctctgaattcctctggaatgagaggaggttcctgggagggtgggagcgacagttgggccagagtgtccttccagacttcccatgttcccaccaccctccacctcgcagccccatctcccactctctgaattcagcctggtttggaggggcttctgcctgcatccctcagttcccagatctcgtcacagccccggatttccaaggtgatgtcctccctttgaagagtgatattttgcagggatttcctgaaatgtcacctctgatttctcaagccttttctcttcattccccccgaggccctggcctgtctaccttggggcctgctcacaggtgtctcctccgggtgagccggttttactattcctgttcagataaatggtaacgctatggattccccaagcaaggccaactactccgaggatcactccttctcttttggaagtaaaaagcaggaaaattagaaaaaaagaaagaaagagagaaaagaaaaaccccacagggggattttaaattactcaatacttccatgccgagtcccctcataaacagcatggcatagccccttccctttcagcctttctttttttttttttcttaaagagacagggtccctgccaggtgaggtggctcatgtctgtaatcccagcactttgggagggccgagtcaggcagatcacttgagctcagaagttcaagaccaccctgggcaacatagcaagacctcatctctaaacaaaaaaaaaaaatacaaaaaaaaaaaaatagccagacaccatggtgcttgcctgtagtcccagctacttgggaggctgaggcaggaggatccactgagcccgggagttcgaggctgcagtgagccattgtcatgtcactgcactccagcctggatgacagagtgagatcctgtctctccttttattggtgttttgttttgttttggttttggtttttttttgagacagggtctcactctgtcacccaggctggagtacagtggtgtgacctcggctcaccacagccttgaactcctgggctcaatggagcctcccccatcagcctcgagagaagctgagactacaggcaagcaccaccatgcctggctaactttttaaattttttgtagagattggggtcttgctatgttaccagactggtctcaaactctcgacctcaagcgatcctcctggctgggcctcctgagtcactgagattacagcgtgagccactgtgccttgcttcatatccttttttcttaaacagctatgcagtattttattgtgtgaatgaaccaaagtttattgaatgaggtgagaggtgctattctgccagcaaaaccttacaatacttttactctgtggactattagtgatgcacatgcaaaaggtgtcattttcttaaacacaaaaatccacagcagtgagcctgcattcccatctgaaaatgaaatctctgaggccaaataaccacttaccttgactttttcctctaactttcccaggcgaatgttgctttttatgactttattaagcactccatccttctcactttctaaacattttgcctagggagaagggtgataaatgggctctcagttttacagaaaaattgaaataacaaacaattattttgcaaagagtgttactgctactgctcacaatcttcattctgcaacctgtcctgcctcaaccccttccccacccactgtgtgagggcctgggcctcaggccaacagttgaggatgggcaggaacagggcatgtggggtgccctgctcgacacaaagagaagaattccagccccacagaccaggggaacgggagaggctgcaaaggtttccagaatgcatctctactcttatggaatctatctttccttcaatcgcatccaaggaataagtgccaagaggccaatcaactcataacttgactcatttgaacaatttcaaaattaaggataacataatatgaatgcacaatgccgtttctccaagccatacatgaaaggcaatacatccagcagagatgacatcatttgaagtcgaatgatttaaactaatatccaggttggacgtgacctgctacattctataaattaactatttcagatgctaaaataaaataagtaatggtgagcattctttccaaggtaggctagtggtgacaagtttgattttccagaaggaaagctaagtcacagagaaattgctccaggtcacatggaaaatccaccctagaagcaggatttaaaaagatctcaggccaggcttggtggtgtgcacctgtagtctcagctactcaagaggctgaggcacgagaatggcttgaacccaggaggcggaggttgcagggagctgagatcgcgccaccgcactccagcctgggcaacatagcgagattctgtctcaaaaaaaaaaaaagatctcagtacctaagactattgtgtctcccacaaaaatgtaataaatgcaagatggtgcagtcatacttggggaaactgaaagtgatttttgttttttctttttgttttatttatttatttatttatttttgagacaaagtctcgctctgtcacccaggctggagtgcagtggtgcgatctcagctcactgcaacctccacctcctgggctcaagagattctcctgcctcaacctcctgggtagctaggactacaggcacgcgccaccatgcccagctaatttggggaaaccgaaagtgatttgtagccagaggtcatcagcagaaacttcccaaggcagagtggagtcctcccactgttggtgtatgtacagggttgggtaagggctctcacgagctcctggagaccaggatggggtagggcaggagtacgtggctcagtcctaggacagggcagagactggcagagcagccactaacacccctggacctggctagaggggctggcctaggcactcccagggtcaaggggcctgcaaggctgtagggatgtgtccactccagacctggctacagaggaccaagagccctgcccagacatcctggcagctcccatgcctctccctgcatggatagcgggtgtctgcttggacacaaaagtccctggtgacaggtggagccaggatggaagaaagcagctctcccacaccctacatttccgctttgactctgaggggcctgaggattctaaacttgacagccaggccatgataaaggtcaaggcaggagaagggaacacattttactaacagtttgttggctcaacaagtaacttttaaatatctggagacagtcagtggcctccatttgtatttccatcctgggcccacaaatattgggggtgggccgagaggagagtgtctgagggtctgggaggatcctgacttcgttgtggaagcctgtgatactccctggcccatgggagaggcatggggcctgcaccccagggaccgggattccctgcacgtcctgccctacaaacaagacggctttgcgtttacagtggcctcaacatgtggcgggcaggttcccaggaaatctctggatgaaagggtttgttcggccctttagatttttcagcaagctttctcttgccctctccatgtcccggtgaggaaggccagcacacacagcagcagaagggaaaatgggcacttaatgctaccacagagagtgccagggttcagctgcctttcagaggggcagcgctgggccagacacttgagtgccttcaaggctccatccatgctgtgtcaaagtcaaattgctttctggaaggctctggaaaggactcagaagtcaccagtaaagtatggccagactgaccacactcttatcagcaattattgtaatttaaaaaactgttttcagccgggcacggtggttcacgcctgtaatcccagcactttgggaggctgaggtgcacaaagtcaggagatcgagaccatcctggctaacatggtgaaatcccgtctctacctaaactacaaaaaaattagccaggtgtggtggcatgcgcctatagtcccagctactcaggaggctgaggcaggagaatcacttgaacccaggaggcggaggttgcagtgagccaagattgtgccactgcacttcagcctgggtgacacagcgagactccatctcaaaaaccaaacaaacaaacaaacaaaaacctgttttcaggaggaaggctcagggtggctggctggaggcacaggatgtcagactcctccacacaggagaaccaaaacaggagtcagtcatcgcacggagaacatctaacggagaccacgggaactcgacaggggagggctgggcggcacccgcgcaatgaaggagagggagacgacagcccagacaggatgggtcttggtcgggagcctggagaggctcccctgtgtcgggaaagggtgagagatccccaggggtccacattctcaccacacactcctgtgatcccagccccaggggagcccctcaacccctgcaggccctgagactggtgcagggagctccctggagtctgtgtgaccccactgctccagagcgggggctcacgctgggtcccacactgacccaggttccaggtagctgcagcacagtggcatcattttgagagtccagcccccaccagactacatcctgccctgggacccagcagcccctgcatctccacatccctggagcgccacggacatctccccacatgcacccggaaggctgcagcggcgaggcaccaggtggacccagtggagcagcgggtccccagcactctaccctacagtgtcctgcatacccagaagagtgtggtgcagtgcactgaagaggctgcccatgagagcaagggagccgaagcaagtgctccccaatcctgaaacctgcctggctggggcccctgtcactaacagcaaccccaccccctccagccgcagagccctgcgcacgtgcatgtgccctgaagacaggcttcccctgcccaatgcctccattgccaaagcaacccaagcacaccacccagggcctggggatcaccccatcctcttcaccacagcctgcagggagtgtcccaccatgttggttgccccaggcacacacacaaacacacacacacacacacatacaccaatacaaaaaattagaataagtgactgttacacttgatttgcagaaatcaatgaaaggacataataaacatgacaaagcaaggcaatatgacacctccaaaggaacataataattctccaacagcagattccaacaacaacaaaaagaaatttatgaaatgcctgaaaaagaattaaaaataatgatattaaagaagctcagtaaaatataacagaacacaaataaacactataaagaaatcagaaaaacaattcaggatatgaatgaggaattcatcgaagagacagatataaaaaagaactaaacagaaatcctggaactgaagaattcaatgaataaaataaaaaatacaattgagagcttcagtgatagactagatcaagcaggagaaagaatttcttttgctttttaaatactcagtgagatgaaagagagagagagagaaagagagagagaaacagagagagagagagaaaaggagcaaaagaaagagagaaaaattaaaaaaaaaaatgaagcatgccttctggtgttccaaggggtgaaaagaagtttaatggcataaaaaacctactcaacaaaataagttgaaaacttcccaagtctagcaagagatttcgaaatccagatataggaagctcaggttcccaaaaaggtcttctcccgacgacattatagtcaaactgtcagaagtcaaatacagaattctaaatatatatatatatatttagacatacatatatttagacatatatatttagacatatatatatttagacatacatatatttagacatatatatttagaatatatatttagacatatatatatatatatatatatatatatatatatatatatgtctagttacatataaggaactctcataagactaacagcgtatttctttcttttttctttttcctttttttttctttttgagatggagtctcactctgttgcccaggctggagtgcagtggcactatctcagctcactgtagcctctgcctcctgggttcaagcaattctctggccttagcccccaaagtagctgggattacaggcatgtgcaccaccacaaccagctaatttttgcatttttagtggagatagggtttcgccatgttggccgggctggtcttgaactcctgacctcagatgatctgcctgcctcagcctcccaaagtgctgggattacaggtgtgagccactgtgcccagctaatagtgtatttctcagaagaaaccttacaggccaggagagaatgagacgatatattcaaagggctaaaagaaaaaaaaaaaaaaaaaacctgtcagccagccaagaatactatacccagcaaagttatccttcataaatgaaggagtaaagacttacagataagcaaacactgagagaatctgtcaccactagacccatcctacatgaaatgcttaagggaatcctacacctggaattgaaaggacgatatctactatcatgaaaacacatgaaatgataaaactaactagtagagcaagcacacaaatgaggaagagaaggaactcaaatgttatcactatagaataataagataaataagaggaaaaatgatacacaaaacaaccagaaaacaatcaacaaaatgataggagtaagtcctcgcatatcaatagtaaccttgaatgtaaattaattaaattttccacttaaaagatacagactggctgaatggatatcagaaaaaaaaaacacgattcaactatgtgctgcctacaagaaacacatttcacttgtaaagatccatacagactgaaagtaaagggataaaaaaatattccatgcaactggaaaccaaaagcaagcaggagtagctatacttgcatgaaataaaacaaactttaagtcaaaaactgcgtaaagaaggtaatattataataataaagggataaattcaataagaggacatatactctaaacatatatgcacccaacaccacagcatccaggtatataaagcaaatattattagatctaaaaggggagatagactacaatacaataatagttggggacttcaacaccctactctcagcaatcagatcatcaagacagaaaactaacaaagaaacattgaatttaactgcactttagacaaaatgacctaatagacatttacaaaacatttcatccagtaacggcagaatacacattcttatcagatatagaacattgtctagcatacactgtgtgttacgctacaaagcaagctcaacaaatttaaaaatactgacatcatgtcaagtatcttctcagaccatggtagactaaaactagaaagcaataacaagaggaactttggaaactgtacaaacatatgaaaattaaacaacatgttccttaacaatgattgggtcaatgaagaaattaagaagggtatcaaaaatttcttgaaacaaatgaaaactgaaacacaacataccaaacacaacataccaaaacctatgggatacagcaaaagcaatgctaagagggaagtttatagcaataaatgcctgcatcacaaaagtggaaagatttcaaataaacaacctaatgatgtacctcaaggaactagataaacaagaacaaacagaacccaaaattagtagaaagaaagaaaaaacaaagatcagagcagaactaagtgaggcagggtgaaacgttcttatagtcccagtgacgcaggaggcaggaggattgcttgaatccagatgttcaaggttagcctgggcaacatagtgaaaatccactgctaacaaactgaaaacctagagaaaatggatacatttctggacaacatacaacctacagaggcaggataagtaaagttatgagaccatactgacttgtcccctttagtgaagccccacatgctcctttctcagtgggctcctttcatgtgcgcccttgtatgtcagcacctaacttatcttagcaagataagtagtcccacaggatcccagccaactaccaggtggttacacgttcctgatacccaatatggcctaggaaaaagaacaaaaatcccttaatcgtaatgtagcttccccaatctccagccaatcaacaccaaaagcccaagaagctattaactaccaattcctgcctgggcagggctaaagatatctccagggtcctgcatgtacagctaggcacaaggtttagcttacagtgagcttttcctcattttaatagtaaaaaacacaccctaggtggaggttttatatgctaattatacatgtgatacatgttagagcatgtacatgctgagtgcatgcaccaaccatagttccacctttcacacttgacctcaccaatactttatgaatatgcatgcacagctcctgtaaagggcatccccttaaaatattagggtctgtctcttactctgtctctcagagtgacttctgctatgcaatagacttcttcacctgctcttactttggactagctctcaaattcttttgtgaagtcaagaacctgaactggcccattgacaacactaccaagattgaattaggaagaaatagaaaacttgaacagaccattaacaaataatgagattgaatcattaataaaaagtttcccaacaaagaaaagtccaggaccagatggtttttctgccaaattctacaaaccttacaaagaagaactaatacaaattctcctcaaactattccaaaaaaatttaagaggaaggaattctctctaattctttcaggccagcaataccctgctaccaaaaccagacaaggccacaataaaaaaagaaacctacaggccaatatccctaatgaacacagatgcaaaatcctcaacaaaatactagcaaaccaaattcaacagtacatcaaaaaaataatatgccatgatcaagtgggatcaagagatgcaaagacagttcaacatacacaaatcaataaacatcatagatcacatcagcagaatgaaggataaaaaccatatgagcacaccaatggaaacagaaaaaaattggataaaaattcaacatccttcgtgataaaaacacttaataaactagacatagaaggaacatacctaacataataaaggccatatatgacaaacccacagctaacatcataccgagtaggggaaagcaaaaagcctttcctctcagaactgaaactagttaaggatgactactttcaccactcttattcagcacagtactggaagtcctagcaagagcagtcaggcaagagaaagaaataaaagtcatccaaattagaaaagagaaagtcaaattttttctctttgccaatgacatgatcttatatttagaaaaaactagacttcaccaaacgactcttagatctgataaaaaaaaaaaaagtttagtaaagttgcagaatacaaaatcaatgtataaagatcagtagtgtttctatacaccaataatgaattccctgaaaaagaaatcaagaaagcaatcccatttacaatagctacaaaaaaatacctagaaataaatttaaccaaagaagttaaagatttctacaaggaaagctacaaacactgatgaaagacaatgaagctgattcaaactaatggaaagacatcccatgatcatggatgcgaagaattaacatcattaaaatgaccagactccccaaagcaatcagcagattcagtgcaatccctatcagaacatcaatgacgtttttcacagaaatagaataaacaatcctactttatacatatggaaccaaaaaggagcctgaaaaggcaaatcagtcctgagcaaaaagaacaaagctgaaggtattaccctacctaacttcaaaatacattacaaggctatagtaaccaaaatagcacagtatcagtacaaaatcagacacattggccagtggaacagaataaagcaccaagaaacgagcccacatatttactgccaactgcttttcaacaaaggcaccaagaacatacgctggggaaagggcaccctcttcaatacatggtgctgggaaaattggatatccatatacagaaaaatgaaattagatctctatttctcatcatatgcaaaaaatccactcacaatggtttaaagacttaaatctaagacctgaaactataaaactactagaagaaaacatagaggaagcactctaggactttagacaaaaatttcatggctaagaccccaaaagcacaggcaacaaaaacaaaaatagacaaatggaactatattaaactaaaaagcttctgtacagcaaaggaaacaatcaatagaatgaagagacaacctgttgaatgagacaaaatatttgcaaaatattcattcaacaagaggctaatacccaggatatacaaggaactcagttctctctgtctctctctctctctttttttttttaaggaacacaactcttaatagcaaacaaacaaacaaacaaaaccaatcccattaaaaagtgggcaaagaatctaaatagacattccccaaaagcagacatacaaatgggcaacaggcatatgaaaaaaatgctcaacaccacaaatcatcacagaaatgcaaatcaaaaccacaatgagatatcatcttactccagttagaatggctatcattaaaaagacaaaaaataacagaggctgatgtcaacctaaaataatcaaaagggtgagactctagtttaaagagagtttattcaagcacaaagtttgaggacaggccacccaggaagtagattccaaagaacagaagtctgtgttctgaagtgcacaagtttgggatcgctaataggaccacatgtaggaaagcttaacagaatttcagtgtctttctatgtaagactgaatgcatagttacaacaatctaattagttgaggcagtctttttctttcaggaaaggtatatttaacattccacattgaagatataacagtcatggggtcatgggtgccatctggtcttaggtagaagaacaataaaggaagcaagcagttcatctttatagatagatgagtgactggaaggaggagaaggtctggtctctggtttctcctagtcatttacaaaacaacagcaatgaggaagagaactaacctataagaagcagaatagccaacaagctacattgctcagtctccagggcttaacttccccctttgcataatacatttagagggtcctgaaattttttttcttttcttttttaaaattgagacagggtcttgttctatcacccaggctggagtacagtggaatgatcgacctcctaggcttaagtgatcctccttcctcagcctcctgagtagctgaaaccacaggcatgcaccactatgcctggctaagtttttcgttatttgtagagacaggttctccctatcttgcccatgctggtctcaaactcctggacccaagtgatcctcccacctcagtttctcaaagtactggaattacaggagtgagccaccatgcctggcctgaaattttactttattttattacactgatgaggatgtggagaaaagggaactttcatacactgttggtgggaatgtaaattagtacagccattatggaaaacagtgtggaggttcctcaacaaactaaaaacaattaccatatgatccagcaatccaactgctgggtatttattcacaggcaaggaaatcagtatatcaaagggatatctacacccccatgtttattgctgcacaattcacagtagcaaagatatgaaatgaacctaagtgtccatcaatggacaaacagataaagaaaatatgctctatttacacaatgaaatattatttggccatataaaagaacaaaaccatgtcatctacagcaacatggatggaactggaggccattacgttaagtaaaataagccagacctagaaagataaatatggcatgtactcattcatatgtgggggctaaaaaagttgacctcatggaggtggagattataatgatagctaccagaggctaggatgcatgtgggtatgggtgtgtttgtggggggctggggggcaggtggctgaatgaagagaggttgcttaataggtataagcatacagttagatagacgaaataagttatcatgttcgacagcagagtaggttgactaaagttaacaacaaagtattgtatatttcaatatagctagcaatgaggacttgaaatattctccacacccagaaatgataaatgctcagctgggtgtggtggctcacacctgtaatcccagcactctgggaggccgaggtgggcagatctcttgaggccaggaattcaagaccagcctggccaatgtggcaaaaccttgtctctagtaaaaatacaaaacctagccaggtgtggtggcatgcacctgtagtcccagctactcgggaggctgaggcacaaaaatgtcttgaacccaggaagcggaggttgcagtgagccgagatcacgccactgcactccagcctgggtgacagcgtgagactccatcttaaaaaaaaaaaaaaaaaaaagataaatgcttgtggtgatggatagcccaaatacctgacttaattgttacacattctatgcacattacaaaatatcacatgtacccccacatgtgcatgtaaatatatttaaaatattttttaaaatgtaaaaatattatgcattaataaaaagatacaattgtttaaaaagaaaaaaatgttttgtaacattttttgagaatggtatctcaagactggtttaattagcattttttttttttttttagggacagggtctttctctgtctaccaggctgcagtgcagtagtacagtcatagctcactgcagccttcaactcccacactcaaatgaacctcctacctgagtttcctgagtagctgagactacaggtgcatgccaccatgcctggctaatttttaaatttttttttgtagagatgggttctcactatgttacccagactggtcttgaattcctgggctcaaatgatcctcctgcctcagcttcctgagtagctgggactacaggcacacagcaccatgccagggtaatacagttgaaattttaaaatacagatggttctagacttacaacagggctacatcctgataaacccatcataaattgaacaaactgtatatcaaaaatgcatttaatcctggcaatacagcagatggttcccaacttatgatggttcaatctacattttttaagctttataatggtgtaaaagcaatgggcattcagtatcaatggtaacttcattatgagttgtaaggagttcctcaatttataataagattacttcccaataaatacatcataaagtcgaaaattcctaggtggaaccatccatcgtaagtcagggaatgcctggataaagcttttaatagatcattttttaaaatactcttaaaatcacatttgcatattaactcgcagtttacttgatgtaaccttcaggaaacttaccaaacacataagactgtcacgttcctgggttatgttttctgccaggccaacaaggtttgccaggtactgatgagcagacatttcgttccccatggctttttccacctgctttttgaggacctcaattttcttttgagatttcctagagagttaccccaaatggtagaataaaaagcccattagtttacatggctagggcatggtgaatatctgtattacaaaaacagcaagtatgttagcatttaaatgctattcttcagcaacctaaatcttctattaagtttcaaggtgagaagaggtaactgaatttaatttgaaaccaagcataattagtgaccccaactcaagtgaataagaggagttgcaaatgtctaacaatgaataggttcatttttttttttttttttgagacacagtcttgctctgtcacccaggctggagtgcggtggcatgatcatggctcactgtaacctccgcctctcaggttcaagtgattctcatgcctcagcctcctgagtagttgggattagaggcatgcgccaccacacgcagctaattttctgtatatatacatatatatatttttttaagtagccagggcttctctatgttggccaggctggtcttgaactcctgacctcaagtgacctgcccatctcagccttacaaagtgctgggattacaggtgtgagccaccacacctggcccataggctcattaagtattattctattaactttctggcttatgttctaaaaggcactttcgaaaaaaagatccagaaattccaaagtagacttttaggaaatggttagaaaagagctcctagaactttgaatcttagggttatcaatatgaccatcaaccatatttcaattatagactttagaaatgttggttaacattggttaacagcaacaatacttattataatctgatatccagtaatttcaattacccttttccattttatagccactattagaaaaagaaaagattaaaagaaatgaaatggaatattcttcatttgtctttttttttttttttgagacagggtctcactctgttgcccaggctggagtgcagtggcgtgatctcggctcaccgcaacctctgcctcccaggctcaaatgattctcctgcctcagcctcccgagtagctgggactacaggtgcgtgccactaccgcctggctaatttttgtatttttagtagagacggggttttgccatgttggccaggctggtcttgaacttctgacctcaaatgatcgcctgcctcagcctcccaaagtgctgggattacaggagtgagccactgtacccagaccatttgtcttttttaactattgaaaataaaagcaacttaaaggaaaaaaagacacaaacctattgattttctgtgctcgttcaagttcggcttccagtgctttgttttgctctgtcaaactgttcttctctaacagcaggctcttcttctgcgcttgcaggactgtcagcttctccatcaactcctccatctcagccctttctttctcttcttccttctgtaattggctgaaggacaaaaacattacatgctcgtatccagcacaatgaagctaaaatggggcagtcacataacgaggaagatgagtgataacagcccagccctccagcccctgggtgggtcacttggaatgcctctgtggaaacatctccccatcctgggccctagaggacctgggaccaagctgctagaccaccggagagagggtgtggctgggcacacactacgtgtgtgtctgtgtgagacagggtctcactctgttgcccaggctggagtgcagtggcacaatcatggctcactgcagcttcgaacttctggactcaagcaatcctcctacctcagcctcccaagttgctgggaccacaggcacacatgatacctggctaatttttgtattttttgtaaagatgaagtctcactatgttgcccaggctggtttcgagctcttgggctcaagtgatcctcctgccttagctttccaaagagctcggattacaggcatgagccaccacacctggccacaaacttctttgatggtgatgatctaacctctttttctcccacagttttggcttatgtctctgtctctctgtctctctctctctctgtgtgtgtgtgtgtgtgtgtgtgtgtgtgtgtgtatgtgtgtgtataccctattccttccaaaaaatctaagatagctctattttttacatggttataaatgccagatttatttaaaaaaaacctgctaaaacaatttttccataataatgtaattataaatacatgtttttaagacaaaagaaacaaagaacaaaggggcacttattttgctgaacaccagcttgggtgttaccgaatttgcatagagagtaacttgggataggggctgcatcctttaccagcgcagcaggaatacacaacaatatatgattttaaggtttgtcaactgtaactgtaaaacatacaaaatccaagattcatttatttcactgaaaacttatttaactattattttattggataaattgttgaactggattaacgataaaaggttaaagaagaatgttgaaaataccaagacttctgctttcagccaagatagagttacagagaccagatttactcctcagctaaaaaaccaggcaaaacagaagaaacaacagttttcggactttggacaacaggcgaggcaggactgtgatcccaaagggaagggaaaacaaggtgagtgctgcaactgctccctccaccttcttgtctggcagacacctgctgagcccaggagccagagatccaagagcaggaaggtcaaggcagctggaatttccagggcagggcagagggcgtttcacggagcgagaaagggctctagagaccttgaagggtctttggctgggtactgatctgtccgtgtgtgagaggaaactgcgtaaagcctaggaaagaaacactacaaacagtaggcagaacaatttctgacatgcacaaagaacaggaaatagttcataccccaccagtcagaatggaaaggccttataataaaagagatattggatagaatccttagaagagtgttactgtcttagcagtggggctaacttagccctaagactagaggttgctttgggcccaccctaacaaaaatcagctttgaaagaatccagcttagccacatgcggtggctcacacctgtaatcccagcactttgggaggctgaggtgggaggatcccttgagcccaggacctcaaaaccagcctgggcaacataacaagaccctgtttctacaaaaagaaaaaaaaaaagaaaacagaaaagaaagtaaacaaataaataaataatccaacaattctctagtggcttaagtgtgcaccagaatgaaatctaacactatttaaagcaatgcaatatgtctaacatcctgtaacataaaatctacaccatccagcacccaatcaagcatgagaataagcaataaaatatgatccatgatcaggaggggaaaaaatcaacagaacagattcagaagtgagagagatgatggcgttggcaaacaaaggtttttagaaaaacatgctcctacatttgagaaagaagagaaaaatagcatgctggggacagagacggagaatacaaaaaagactcaaatggatctttcttacagagatgggaaaaatcattacacaaagtgaacaatatattggatgggactaacagcagattagattgtagaaggatagatttgtgaagttgaagagagatagtaatagacactgtctgattgaagcccagagagaaacaagtgtgggctaaaagtgaacagaacagtcaacaggacaacatcaagcagtccaggagaggtgagagggaaaaacagaagagaccgttcaagaaataatagccaaaagatttccaaacttgatgaaaaatacacactgatagccccaagaagcttaatgaacttcatgtagagtaaagaaaccatgctggccgggtgtggggtcccccactgtaatcccagcactttggaaggccaaggcaggaggctccctcaaggccaggagtttgagaccagcctgggcaacgtaacaagactctgtctctacaaaagatttaaaaattagccgggagcagtggcacatgcctgtagtcccagctactcgagaggctgaggcaggaggatcacttgagcccaggaggtcaaggctggagcaagcagtgattgcaccactgcactccagcctgtccaacagagccagaccctgtgcaaaaaagggtctgaaagaaagaaagaaaccatgctaaggcatatcccaattaaaatgctgaaaaacagtgacaatgaaaaattcttaaaagaagcctcagagaaaacacacgttatcttcagaagaatacagataaccgtgacagcagattttcatcataaacgacgcaagccaaaagactatcaacagccagcatctttaaaactgaatggaaaaaaacccacaaactaccaaaaacctgtcagcttggaattcttcacccagtgaaatcatgtaatcaataaagtttcataattttcccaacggaagtactgtaaatctttccacatctatttgtgaagctttgtcgatggttccttccttttaattaaaaaaattttttctcatgatgatagcctatcattaccttagttttcaaaatatcattttctttcttccttttttttttttttgagatggagtctcactctgtcaccaggctggaatgcagtggcgccacctccactcactgcaacctccgcctcccaggttcaagcggttctcctgcctcagcctcccaagtagctgggactacaggcatgcgccatcacacccagcgaatttttgtatttttagtagagatggggtttcaccctgttagccaggatggtctcgatctcttgacttcatgatccacctgcctcagcctcccaaagtgctgggattacaggtgtaagccaccaggcctggcccaaaataccattttctacacatttttttcctacaaagaaatacaattaatttttataaattttctgttttgaacaattttgctaaaacctcttatttttaatgatttgtagatttgttttctacagatagaattatgtcatttatgaataatgacactattgttttcccttttcccaaaccttctaagtttttcatgccacgtgtgtcagttaccacttggtagccagtgctgttaatgttgtcagaaatggtgtcagagggcaaccttgtattgtttccaatctcaataggaaagctttcaacatttccctatttggtgtgatctttattgtagctgtattttttaatagaactttagaatgttagaatttaatagaagttttacatctacattcataagtgaaatgaaaagtaattttcctttcttatatgatcactgttgggttttggtatcaaggttatactaacctcattagattaaggagcattaattctttttctgtttctagaaaggtttatgtaagactgaaattatttcttccttgaatatttgtagagctctctagtgaaggtatccaggcctggagttttcaaaggaagatttttttttttaattcaattcttttaatgattataggactattcaggtattcttcttcttcttgagtcagttttaaggtaagcttttcaaagaatttgactatttcatctaaattttcaaatgtattgacataaattatttctaggtgcacacaaatttaaatttgtgtgaattctacttggtaaattgagccttttatctttgtgaatcatcctctttgcttagtattgttgtctgttctgtttgagacagggtctcactctgttgcccaggctagagtacagtggtgcaatcactgctcagtgcagcttcaaactcctgggctcaagtcatcctcctgcctcagcctcctgattagctgggattacagacggtaagccatcacacccagttagtttttaaatttatggcagagacaaggtctccctatgttacccaggctggtcttgaacctctggactgagccaccatgcctggcctaagtagtattttttaccttaacatctaccttgttagagattaagatctaccatgtctattttggtttgtacttgagtagtactgcttttcctgcccttttacttttgacctttctctatccttatgcttgggacatatatcttaaagacaacacagatgtgctttagtttacactgtgacattctttgtcttttaactggagcattttatccatttagcgtatctactgctggtatgtttggctttaaatctaacattttactttttgttttctattcgccccttgcccacctttcattttcctgctcttatttggattgttttttaatcattctttttacccccatactagtttaaaagttatatacattgtttccagaaatttcatcatgcatattttcaaattataaaattagtcaacacttttatcctcttctaatgatataaagactttagaacacaaactccatgtgccttgtgcctgattatatgctattattgttgtgccttttaattttatgtattcttaaatccccaaagatattatcattttatagacttagtgttcattacatttatctatatatttaccactatcatttactttcattttacttccttcttgcttctcaggcatcctgccttgaatcaaccatcccctcctcaggggcctcccttgaacactgtatctaaagcagtcctcctgactgcaagtctctctccatcttattatcctcatatatagatatatatataaatactaatagttacatatataaatatatatacatacatataatatatatataaacaacatctttaagagtaagaattcttaattttggctattgtgtgtttcagttctaaaaattctatttgtttctttttcaaatccactatgtcatgttttgtagttccctgaagaaattttagagcttctctgtctcaaactcctgggcccaagagatcctcccgccctggcctcccaaagtgctgggatcacaggcttgagtcactgcgcctggcctcacccaggactttcttaaaaccctcccagatgaaatgaaacacttttattccctgtggcttaaggaagaaagaccaggggccaggcatggtggctcatgactataatcccatcgctttggtaggccaaggcaggagggtcacttgagaacaggagtccaagaccaacctgggcaacacagcaagaccccatcgctgcagaaatacttaataattagccccgcacgatggcgcgtgactatagtcccagccactggggagactgaggcaggagaatcgcttgagcctggagttcaaggctgcaagtgagccatgattgagccacttcactccagcctgagacaagatgagatcatatcttaaactaaaagaagagaataaagataacacattttagtctaacattctgaggacagtccataaatgctttccctccaaacatgtctgtggtttctctattttttttttttttttgacggattctcactttgtcgcccaggctggagtgcaatggcgtgatattggcttactgcaacctccacctcctgggttcaagccattctcctgcctcatcctcctgagcagctgggactacaggcatgtgccaacacacctggctaatttttgtatttttagtagagatggcgtttcaccatgttggtcaggctggtcttgatctcctgacctcaagtgatctgcccacctcagcctcccaaagtgctaggattataggcgcatgccaccacacttggccaatttttgtaattttagtagagacaggcttttgccatgttggccaggctggtcttgaactcctgacctcaactgatccacctgcctcggcctcccaaagtgctgggattacaggcatgagtcactgtgcccggccccatttttatcttttctactgtattttgactgtactttttctgtttagatatgtttagatacacaaatacttaccattggtttatagttgcctgcagtgttcagtacagtaacatgctgtgcaggtttgtagcctaggagcaaacagctccaccatctagcctctgtgtgcaggaggctatgccatgtggctttgtgtgagcacactctgtgatacccacacaatgacgaaatcacttaatgatgagtttctcagaatgtatccccattaagtgacacacgattgtgttttgatagccccctagatgtaagtaaagaaggtataaaaagtttaaaaagaagtcattaatggtgaaggcagggggagaaatgaccattttaaaataacaaagatgccaccaaatcttttttcagtggaaattggagaaagacctttgtggctcagaatgaactggctggggagggaaagcctttatggcagctttggctgaacagctttgggctcagagtcgatagatgggtcaagggtagaggaatgagaaggatggagccgggagtgtgaccctaatgggctgtcccgcggaaggggcggtgtttggagagagaatttataacatggaagaggggcaggaattcatcagagctcgaatatgtggaattccatgaagacctagtgaaaaatagacaaaatgaggagtaggaaactgagtgtttttgttttggctacagaagctgaggacaccttggagctttggagggcacttcggagggcaagggagcagaagtgccctccgacagcctccactagggagccccttcccatgttggcatcataatagagataggccacatgcagaatactcactgatttatcagcaaagcagctgctgaaccagcgctcacaccgggggaatgtctggggaggagtttgggaaagggttatgcctcaggcaaaggtgaggtcatgaggacaagatttttgtgtagggataaaagggctcattgaacttgtgtggggcaagcctcgaggtgtggtgtgtatgtgttctttcacctaccctggttgaaaagaaggcaaataatgggtattttgtcttgctttctctgcccattggcaaccctgcatggaaggaacaatgatgcgggaaatggcacaagctcatgttcctggtgagctgtcagttggctttggattggactggcggtcacatgtggaagcagagatggctctctttgcttttactattttctagaaagattgggcttactcaagatgaaggtgggagaaaaacaaggtgtcaacccacttctctaaggaaatttagcaaactcttttggggagagctaaagatttaaggggacaggttgtatctacaaagggaagcctttatcctggcttgtgggagacctgtatcctaaagtaaagctgaccattgcatgcaccttatctatatacacagaggcctgctcagcagccagggagatgcctgcacagggaaccaccagggcagaaaatccctcaactgacacagtacacaccaagtaccagtagttcctcttcctaaaatcagaacagatgactagatgtgaacaagcaacaagggtcattaggcatgatgaaagaaattgcaacatgaaagagagatccagataagcagagaagctcaagggaaactgagataacagaggactaaggaagttttaaaagaacaaaatgccatgagaaaagaaagtacagtcactaaataagagccagactaaacatgattaccagaatttaaaaaatatcacaagggctgaaagatatatttgaggaatctctcagaactaaggaaacaaacgattgggaaatggagagaaaaggtactagaagtggaggacccatccaggaggtccagccttaggtcatcaggaacctcagaaggatacgagagacaccagaaaggaagaagtgaatagctgaagggcatctgcagacctctgaagaccttggtggattcactgcagaggtacccactgcagcgaatgaaaaaaagacccccacacctacacatattctaatgaaataccagtcaacctagattgatgagataggccagatgcagtggctcatgcctgtaatcccagcactttgggaggctgaggcaggcagaatgcttgaggccaggagttcaagaccagcctggccaacatggtgaaaccccgtctctactaaaaatacaaaaattagccaagcgtggtggcacactcctataatcccagctactcaggtggctgaggcacaagaattgcttgaacccagaaggcagaggttgtagtgagctgagatcgtgccactgcactattccagcccctgggtgacagagcgagactctgcctcagagagagagagagagagagagagcgagagagagagggagggagggagggagagagagagagagagaaatggtacacctgtacagggcacttaaccatgaatagagcttgcaggactggaaagaaattgctctgggtgagtcagtgagtggtgggtgcatgtgagggcctaggacattactgtacactctcgtagactaaatactgtacaattaggctacatttaaattatttttaaaattgttctttcttcaataatagattaattttagtatactgtaactttttactttataaactttttaattttttaactttttgacttttttataacacagcttaaaacacacattgtacaaatattttctaattttatattcttactctcaagcttttttctattaaattttttttaaactttctacacattttttaaaaaaatgaagaacaaatgccacaggagcctaggcctgcagagggacaggatcatcaatgtcactgtcctccacctccatgtctcatcccactggaaactcttcagggtcagtaacgtacatggagctgtcacctcctgtgataacaatgcctgcttctggacacgtcctgaaggacccgcctgagcctgttttacagttaactttattttgttataagtagaaggagtacactctaaaataacaataaaaagtagggtaaatacataaaccagtaacacagtcatttactatcattatcaagtattatgtactgtccataactgcatgtgctaggctttcacaggactggcagtgccgtaggtttgtttacaccagcatcaccacaaacacgagagtaatgcattgctctacgatgttacaatggctgtgacatcactaagtgataggaattttttggccccattataattgtatgggaccactgtcgtatatgtggtccattgttgactgaagcattgttatgtggtacatggctgtatgtttttgtagttatgacactgccacaaaaacacattggtcgcaggagcagatgtttgagaaaaataaaattataaagatgaacatgatttcaaaaatgtttccttcctctactacaacaaaaaagcacatgtctggccacacatggtggctcatgcctggaatctcagcacttggaaggccaaggtgagtggactgcttgagcccagctcaagatcagcctgggcaacatggtgaaatcctgtctctaataaaaatacaaaaaatagccaggtgctatggcacgtgcctgtggtcccagctactcaggaggctgaagcggaggatagcttgagcctaggaggtggaggttgcagtgagccaagatcgtaccactgcacttcagcctgggtgacagagggagatctcatctcaaaaaagaaaaagaaaagcacgagtctggcttagtcagcatgtaatagcagagtcaaaaccaggctccagtaattggaatcactagcatttacttaagcaccaagcttcacatgcactagctcatttgttgccccacaccaatgctatggagggagaaggaggagttggagagaaacagaagtcaataggtattcagtcaaccattttgagctgaaaggctcaccgtttaaaacattatttcccccttattacaaaagtgaataggacacttggaaatataaaaacatacaaaaggccaggctggtggctcacacctgtaatcccagcactttgggaggcctaggcaggcggatcacttaaggccaggagttcaggaccagcttggccaacaaaatacaaaactagccggatgtggtggtacatgcctgtaatcccagctatgagtggggctgaggcatgagaattgcttgaacccaggaggtggaggctgcagtgagccaagatcgcgccactgcactccagcctgggtgacagagtaagactctgtctcaaaaaaaaaaaaaggaaaaaaaagaaaattaaaattactcattgtgatggttaattttatgtgtcaccttggctcggctatggtgcccagttgtttgctcaaacactagacgttgctgtgaagtattttgttgatgtcgttaacatttacaatcagttgactttaaataaaggagatttactctcagtaatgtaggtgagcctaatctaaggccttaagatcaaaaacaggtttctcaatgaaggagttctgcctcaaaactgtaagatggagatcctgcctgggtttccaatgggctggcctgccatatgaattttgagcttgcctgcccccacaattgtgtgagccaatttttaaaagaaatctcactctctctctttttctcactatcctattggttgcttctctcgaaaaccctggttgaaacacttacaatctcatctgccaaagatatgttctattaatattttcccattctgccttttttctatgtacttacagtacatatgtaattttatatagctacacacatataattttataatttatataaaatatggccgggcgcggtggctcatgcctgtaatcccagcactttgggaggctgaggcgggtggatcacgaggtcaggagatcgagaccatcctggctgacacggtgaaaccccgtctctactaaaaatacaaaaaattagccgggcgaggtggtgggcgcctgtagtcccagctactcgggaggctgaggcaggagaatggcgtgaaccccggggggcggagcctgcagtgagccgagatagcgctactgcactccagcctgggcgacagtgagactccgtctcaaaaaaaattaaaaaaaatttaaaaaatagaatatataaatatataataataaaaaatataaatatataaaatattcatatataattatacaaaatattatataattatacatatattagttacacatattaattatgtatgtttcctatacataattatcatatataccatatgtatatataccatatctctctctcttacatacacacacatacaagattctttttgacatgagaaaatagccaccatatatatatatatatatttttttgttgttgttgttgttgttgttgttgttgtttcacaatgttgcccaggctgatctcaaactcctaggctcaagcaatcctcctacccggactattaccaattggccaattaccaattacatacataccatacataggtatatatatacacgcacatacacatgtaattatacaaacacatacatttatacatacatactagaatgatcaactcatttcactttgcctaggacattcccaattttagcactataagtcccacatcctgggaaacccctcagtcccaggcaaactgttatggttggttacacacacacatacacacacacttttttttttttttttgagacaaagtctcgctcttgtcccccaggctggagtgcagtattgcaatttcagctcactgcaacctccgcctcccaggttcaagcaattctcctgcctcagcctcccgagtagctgggattacaggtgcctgccaccatgcctggctaatttttatactttcagtagagacagggtttcaccaggttggccaggctggtctcaaactcccctcctcagctgaaccacccgcctcggcctcccaaagtgctgggattacaagtgtgagccaccgtgcccggccacacacacgtcttaaaaaataaaattgtaatcattttctatgtgctgttttaaaacctaaactcattacttaaaatatattgtggccaggcaggcacgcccctgtagtcccagctacttgtggggctgaggtagtaggagaactgcttgagtccaggagtttgagaccagaccagcctgagcaacattgtaaaaaaacagacatatggtggctattttcctatgtcaaaaaggatcttgtgtcacatcatatttaatgactgcatttccttccatttcaaggatatatcctttcatttaactaattccttattactggatatctaggtttccagttttactattttatttatttatcattttttgagataggagacagggtcttactctgttgcccaggctggagtacagtggcgtgatctcagctcactgcagcctcgatctcccatgtagctgggaccacaggcgcataccaccacgcctggctagtttttgtattattattattttttttggtagacatgcagtttcgccatgttgcccaggctggtctcaaatttccaggttcaagtgacctgcctgccttggcctctcaaagtgttgggatcacaggcatgaggcactacccccagcccagttccactattttaaattgcctttggttctaaaactaacacaggccaaaacagtatgaaaaaaaaatcacaaacacccaaagtgcagactgcagccctcaaggagagccaggctctactttaatttaccatttattaccaaagttattaaaagaaaaaaaaagtcaggctgggcgtgatggcttacacctgtaattccagcactttgggaggtcaaggcaggcagatcacttgtggtcaggagtttgagaccagcctggtcaacatggtgaaaccccgtctctaccaaaaatacaaaaattaggcaggtgtggtgagccgcccctgtaatcccagatactcaggaggctgaggcaggagaatcacttgaacccaggaggtggaggttacaggtgccgagactgcaccactgcattctagcctgcgcaacagagtgagagtccgtcccaaaaaaaaaaagtcccagtctcactttcagacacctgtgccactatgctgtgcatgaccataggtgaagaaacccagaaagaactgagcaacctctctccattctgcctataaccacaggcagagtgactcattatactcaaaaagtcattaaatcagctgggcgcagtggctcatgcctgtaatcccaaaactttgagaggctgggatgggcagatcacttgagcccaggagtttgggaccagcctgagcaacatagcaagaccctgtctcgaaaaaagaaaaaaaaaaaaaaagaaaaaacattaaatccttacctttttaattcattcacaattgatttatgaacttccactgcgattttgccatccgagtgtgttttgagttcttggcatttggcacgtaaaatctccagctgttccctgttctccgccagctccttttcctggccgtgggtttttgcctccaggagcattagttgtttagtcagcttagaaactgaaaatcaaaagaggaagataaaaacttggcacagaagacctcacaaaacacaattatgggctattaggaaatactaatgagagtcagctgataaaaatgaccttttaaagatcttttgagccagacgtggtggctcacacctgtaatcccagcactttgggaggctgaggcgggtggatcacgaggtcaggagttcaagaccagcctggccaagttggtgaaaccctgtctctactaaaaatacaaaaattagccaggcgtggtggcaggcgcctgtaatcccagctattcaggaggctgaggcagagaatcacttgaacccaggaggcgagaaggctcagtgagctgagatcacgccactgcacttcagcctgggcaacagagtgagactctctcagaaaaaaaaaaaaaaaaaaagatattttggagtgttataaattaacaccaaaggctttgtccttagaagttactgtccatactaggcacagtgactcatacctgtaaccccagccctttgggaggctgaggggagtattgcttggggtcaggagtttgagaccagcctgggtaacatagtgagaccccatctctacataaaaatttaaaaattagcagggcatggtgacatgcgtctgtggtcccagatatccgggaggctgaggcaggaggactgcttgagcccagaagttcaggactatagtgagccgtgactgggccactgcactccagcctggatgacacagcgagaccttgtctccaaaaacaaaaaccaaaaaagccaaaagaaattactatctctacattaagcactcactaaatatatactttttaaaataaaatccactataatattttaccaaacatgattccagtcttcaaggaactgactttcctaagagtaaagccttaaatcacacccaggtgtgtaagtatatgtcataacgttgtccctaaagctgcaaaattttcaagatttttaaggacatcaaacatggccaaactaagaactggatttattattctccttccctttcgtcattaaacttttattttatgtcttgtatctaaagtaagtcataaatattttcatcctgtgttacatggttgcatgtaataattcccaagcgtctgccgacactagcacttagaggtatttattatagcataaaactgtacatctctctactctatgaaaatatctaattggtggctgggcacagtggctcacgcctgtaatcctagcattttgggaggccaaggtgggtggatcacttgaggtcaggagttcaagaccagcctggccaacatggtgaaacacccctactgaaaatacaaaaattagccgggagtggtggcgcgtgactgtaatcccagctacccgggaggttgaggcaggagaatcgctggaacctggcaggcggaagttgcagtgagcctagatcatgccactgcactccagtctgggcgacagagtgagactgtctcaaaaaaaataaaaagaaaatatctaattggtcaaagtgaatcgctgtttctgggcaatgggaaaatagcacaggcaactcactgaatcatagaggtcaaaaggttttccctgccccatgtgaccagaaatcctctttctgttcagatctggtatattcaagaaaattaagctcagtaaataggaaactaatgtcatccctaaccctgaaaacaaagataagaggctccacaactctgtttcccctctcctcttaacaatgccggagtaaaggcaaatactcctgggccatgcaggtctcaggagaaatcacatggaggaaactcctgtgtgcatctctgggagatgctctcatctttaaacacgacctggttctcagaaacaggaagtgctagccctgcaactgcagcaacagcaggggctgttcatggacctgccatgctgtggaaggggctgccattccaaaagcagctggagagggaaaacctccatctgcttctcagggtgccacagcctcatgcaagatggcttgtgtttcagcttcccagcctatgccattcttcactaagaaagaaaaatcagtaaagcaaagggaaaaaatgccactatcttttgtactcatgaattacggttttaaagcagaagcgatgactcttaacctggcccccttacagttgtgcactgtcacagactatgaggctcctaggggttgggggaatgcatgggaagagatgggaagagggacactctcggaaggtgtttgatggaaatctaacctgcagtgatgtcgcctcccaggcccgcagctctgaaggaaggaaggacacaggggaactgtttagaaagtgaatggttctgcttacgcatccaacaaacatctgggaagagaccctgtgttatttcagatgtttacctcacgtgatcattcccatttctaaggtactattttaccccaaaaccagttctgctgagtctagcactattacctacgagtgatttacaaacccatgggatgatgagagacactgtggagtctgaaaaagcaatctatgcattgagggtagtgacgtggaaaggttataaacagccacattccagtcaaaaatgcaaaacatgacttctctcattttcaactggggcccccggcaggagagagatagaagggtaaaatgacaatagtgacatcaatgcatgaccagtcctcactggaaggacctcaccttcttggaggcgctcctggtggctgtccttggctttcctttgctgaatctccaactgctccagcaacaacttgttttcctctaaaaccagttttgcttgagtctgaagctgacgcctgcaattgatttacaagatgaaatactgtgattcaggtgctgaatggttacagaaacactctggaatctaaaaggaagcaatggctgcattacaggtaatgaatatcaagtcatgtcttcatgttaaacatattaacacagcagcaaatcctgccatttgcagtcaggcgaggaaggacagccgtgaagtctgaattacggactgcttcagaaaacgctttcagatgtaaaatttcaaacatgtacagaagtaaagaggatagagtaggagactcctatgtgcacaatacccagcttgaacagtcactaaatggctgatgaggtttcatctgtataaacctctagtcctgctgcccactatattattctgaagcccatatggaacatgtttaaagaatttagaaagttcccatttcaattttaaaatactcctttgtaatcagtagcatatttgcaaaacaaaacaaaacaaaaaaacaaaaaaaactgactctgttagcaggctttgaaatggtttcttttttcttttttctttttctttttcttttttttttttttttttgagacagagacttgctctgttgcccaggctggagtgcagtggcgcaatctcggctcactgcaagctctgcctcccgggttcacatcattctcctgcctcagcctcccaagtagctgggactacagatgcccaccacgccgcctggctaatttttttgtatttttagtagaaacagggtttcaccatgttagccaggatggtctcgatctcctgaccccgtgatctgcccgcctcggcctcccaaagtgctgggattataggcatgagccaccgcgtccagccgaaatggtttcttaaaactgtatgaatctgccccagctttcctctcagcacaaacaaatcctctccttccagtgcaatgtaaaacccagcccagctcagccctcaagatcgcaaattctgattagaatgagctgaagggaccttagaaatcatctagtgaaatgctgaccacccaaagtacactgggcgttaagtttatttactaaagcagtaaataatctcgattttccacttgaaaccctacaggtgaggaggaggaaggagagagacaagatgaaaggagtcaggctgtaacaatggtgtggccccaacagtggtgtgcactggctcctgggcactgtgggggtgcctcttgcctgctaccagcacccagggagtgggctgccatgctgttgggagggggctcgcccaaaactggtctgtgctagcctcctcattcccgccacaaactgggcagctccatgatggtctgttttatgttttagacttatttatttagagatagggtctcactctgttgcccaggctggagtgcagtggtgaaatcttggcccactgcaacttccacctcagcttcctgagtatctgggattagaggcatgcatcaccacaccaagctaatttttgtattagtatgttttggtagagacagggtttcaccatgttggccagcctagtctcgaactcctgacctcaggtgatcctcctgccttggcctcccaaagtgctgggattacaggcgtgagccaccatgcccagccgcattttggactaatttataagactttttctttatttgttcattcattcatttgttcacgccttccttcctcccttccttcattcatttcactttttattttttagaaacagggtcttgttctgtcacccaggcaggacaggagtacagtggcgccatcagagctcactgtagccttgaattcctgggcttaaccgatcctcctgcctcagccttctgaatagctaggactacaggtgcatgccatcacgcccagctaatttttaattgttttgtttttgtttttgtttttttgagacaaggtcttgttctgtcacctaggcacagtggtgtgatcatagctcactgcagccccgaactcttggcctcaagtgctcctcccacctcggcctcccaaagcattaggattacaggggtgaaccactaagcctgagccatttctttttaaaatgaaagggatcaatcccccattcctaaaaaagagttcaaaatctcagatttggtttaacactccctcttattttgttttatttatttatttatttattttattatttgagacatggtctcgctctgttgcccaggctggagtgcagtggcacgatctaggctcactgcagcctccacctcctgggttcaagtgattctcctgcctcaggctcctgagtagctgggattacaggcgtgcaccaccacacctggctattttttatatttttagtagagatgcggtttcaccatgttagccacactggtctcaaactcctggcctcaactgatcctcctgcctcagtctcccaaagtgctgggattataggcgtgagccactgtgcccagcctccctcttattttatagagaaagaaacagacccattaagcctgaggtcacccagtgattcagggggagttaggaaaagaaatatacaaaatttagttgcaccccagaagttcattgagaaattactggcaaccaagcagaaagcgtctgctgggccaggtgcggtggctcacgcctgtaatcccagcactttgggaggccgaggcgggcagatcacctgaggtcaggagttggagaccagcctgtccaacgtggtgaaacctcgtctctactaaaaataaaaaaaaaaattagccaggcgtggtggtgggcgcctgtaatcccagctactcaggaggctgaggcaggagaatcacttgaacccaggaggtggaggttgcagtgagtcgagatcgcgccactgcacttcagcctgggcagcagagcaagactctgtctcaaaaaaaaaaagaaagaaagaaagaaagaaagtgtctgctgaagtgtgaagtccgtgtaccgagtgctgcatgcaggtttagcagccgtgcaggtgtgcaggtaccgagagcggcaaggtctgcccaccaagtgtgatgctccagagcccagagaccctcctgcagctggagggcagtgaattcaaagtaagaggctggcggccagggaggccctgagcaagcctgacactctccccatgctggcgtgggccatcacactggagcaaagggcagatttcaaatcccaacaaatgcaggattggggaacactgcggggctgtggatttgaaagcagggcctgcctttctttcctttctttcactggttttattttaaggaaacgcagacaagttggatttgtggctgtatacaatgctagggaaggaatctggggttccagaatctgccaaggtctcttgagccccagcctggctaagctgctttccagtccactgttcaaggagggtgcgaggggagacacactaggaaccctgaaggaagaaaatccaagctcagccagggaggtcacagagcaccaagacccaggagctgcctgagccagtcccacctgacgcatcggtgaccacaaaatcagggagagccaatggtaagaatgctgttgactcaattccagatttctaaacatcacatatagaaaatacttcattttttccagtgatgttaagacatttgaaaacactaaatataacatagctattcaaagtgagtaatttttgttttcttagtcctgcctggatattgcttttaggcttttcaagacatgtactttctctaattcagttaacaggcatttgctgttgctgtgctagatgcggggccacacacaaaaatgagcaggacattggttcctgcccctgaggagttcacaaaggagaagatggaggcagatgtggaggcagacaggataggcaggcgcagtgtggcaggtaccgggacagggcatgtgtttaaggctacatcagaaccggagacaaaggggccgggtgcagtggctccagcctgcaatcccagcactttgggaggccaagacgggaggatcactggagcccaagagttcgagaccagcttgggtaacccagtgagactctgtatctacaaaaaattttaaaaaatggctgggcatggtagcacacacctgtagtcccagctacttgggaggctgaggtgggaggatggctttagcccaggaggttgaggctgcagtgaggtatgactgagccactgcactccagcctgggtgacagagtgagaccctaactctaaaaaaacataagaaacagagacgccaggcgcagtggctcacgcctataatcccagcactttgggaggccaaggtgggcagatcacatgaggtcagaagttcgagaccagcctggccaacatggtgaaaccccatctctactaaaaatacaaaaattagccaggtgtggtggcacgtgcctgtaatcccagctactcaggaggctgaggcaggagaatcgcttgaatccaggaagcagaggttgcagtgagccgagatcacaccgttgcactccagcctggccaacacagcaagactctgtctcaaaaaaaaaaaaagaaaagaaacagagacaagggagcaataatggcctctcctgaaggcagtgctatagacaagtgccattacagtaggaccctagaggatgaggagtgcagaaggggctttcggaggaaggacagattggaagtggggcaacctcagttgtcagggaatctgccagggcaggcggatggaagctggtcgtgcaagcctcatgagctttctgttttgggaggccattttgagctttctgttctgaaaccctgggagccatcgctggggcctaagaagggacgagactctccaggtctgagatggaaaaatcaccctagaaaaataccaactcagaaaataaaaagcagaaagcaactgtatttcaggtttgagaacctacttagaattttaaaagtcatcttgaaaatgtaagtttagaataatttattagggttttattgtaccttattaatttcttagaaactctcccgtaaaatattttagttaagaatgtaattatgtatttgataattttataacatattttcctgttaccatttgttttaaattagcaaaagagcagaaacacaatgccacttgccattcctcactggtaacagcactactcttatttaactcttggtgcaattcttcattttctttcaccacttcttggactcgcatcctaaacattctcatttcctcctgaaataaaatgtacgtaaattataacacacacatacccacgcatctatatttctcagttctggtgctgctgctgtggctaaaatcaaatggtaacagccatttagcaaggtctcacaacaggccagccttcaactctcggtaccagcaccagtggtgcctgctctcagggagcttacggtctagtgagaaagcactaggaccaaatgcaaggccaagtacaagaggcaaagaacctgggctttcgagtattagattcctaatttgctaacattgttctataactgccgaatactgatagaaaaggcagagatgcccatcaacgctgacatttttcctttgtttgaagatgcaggagaataaattggaggtttttaatataaaaaataagacttttcatccttaattaaagctagatttggtggggaaggggttagttagtgtgggagttggaggaagctctttttttttttttttttttgagacagggtctcgctctgtcacccaggctagagtacagtactgcaatcacagctcactgcagcctcaacctcctaggctcaagcgatcctcccacctcagcttcccaagtacctgtactactatgcctggctaatttttgtattttgtgtatagacgaggtttcgccatgttactcaaggctgctcttgaactcctaggctcaaggaatcttcctgcctcagactcccaaaatgctgggattacagtcatgagtcaccacatccagccaaggctcttagttttgtccatgacaaccatgagaaagtgtcttactagcgtcatcagtctgcagagcttcactggccattagccacaacacgaggtctgtcgctgggccggttttgatgcctaacagtctatgtctgtttcagctcccaacagtctgtgtgtgtgacacttcagctgagcctcctccatcagggcttttccagcttccgtgtcctgcgctgtcctttggtgagaatctgaggtgccaatatttactctggtgtgcctgtaaaatattctactcccagctgtcaggtgtttatgcctacacccttttaacttaaagcagcactgccaagtaacttctcctctcatctctccacccagacacactcactcactgctggcagtccatgtgactcttttttggaacaggggtcaggcaaactaaagtgtgcaaaccagctgcctgtttttataaataaagttttatttatttataaataaaataatgggcctcgcccattatttacatgttatcctcatctgctttcatgttgcaacagcagggctgagcaggtgcaaacagaaactgcatggcctccaaagcctaaagtgcttattaactggcccttgacagaaagtctgtgctgaccctgacttagaaggagcaccaaaaaaataatattattagctattaggattgttatatattcaattagtacaagattcattcatgctcttagaaaattaagcatccaacactcagtctaaatgaaaaggattaaaattcctttccatgggacatggacacgggacagcatcactgattaggaacaagctgggagcctcttaaaggaccctcccagctcaggatcccagaacaaccaacatttctttcgctggatccttccaatttcagggatctatatggacacttaaatgaggaacccagaggaatgcaggaggcacaggaggcatctacaacacctacacaggcttggcctcctgaagttagaacgagctccgctgcgcgaagtcattcccacaaaacggcggtggacaaggcagaaatggataaaaacctcacttctccatttccaacagctcagcaatcagacttccctggggtcagctcatcctagaattaagaagcatctaagtttgcccaaaacatctccagcctttccttcccatgtctgcccaaatagccctttttttttttttttttttttcgagacggagtctggccccatcgccaggctggagtgcagtgatgcaatctcggctcactgcaacgtccagctccctggttcaagctattctcctgcctcagcctcctgagtagctggaattacaggtacgtgccaccacaccagctaatttttgtatttttagtagagacggggtttcaccatgttgaccaggctggtcttgaactcctgacctcatgtgatccacccacctcggcctcccaaagtgctgagattacaggcgtgagccaccgcgcccagcccaaatgtcccttctaatggtggtatttgcagctgcacagtaacaggaaagaagcacttcccccctgctgtcttccctgcaccccaagatctcagcccatatgggctggctgtccagaaagccatggcttctcatgcagcactgctctgaccctccatacctctcccctcgctccctatccacccctcctgctctgccaatcactcccttacttcctcccctcttccttctttccctgcctcccaccctgccacactccttccttcctcctttctgtcctctaataaacatttggttatctataatatgctgggtatacctacattcaaaatgtttttataaaatttgaagcggtcctatatttttataaatcttgtgtcttctgggacatttgccagcctaccttgagggtggcattgagctcgtccttctctttcatcatatcttcataagccagcaacaatggtgacaggtactttatatccaactgaagatagagagtaaaggaaggttaatatatttcttacatctaaacacaaccagaaaatttttaaatggcaagaagttatacttttttgaaatggtttctttggttgcagttgttattgttttttaacgactctcccagctcaggatcccagaacaaccaacatttctctccttggatccttccaatttcagggatctatatggccacttaaatgaggaacccagaggcatgcaggaggcacaggaggcatctacaacacccgcacaggcttgacctcctgcggtcagaatgagctccgttgcccgaagccattcccactctgccgcccaggctcgcgtgcagtggcacgatctcagctcactgcaacctaaacctcccgggttcaagcgattctcctgcctcagcctcccaagtagctgggactataggcatgcaccatcacgcccagctaatttttgtatttttagtagagacagggtttcaccatgttggccaggctggtcttgaacccttgacctcaactgatccacccgcctcagccttccaaagtgctgggattacagacatgagccaccgcgcctggcctgaaatggtttttaatagctatgcaaatataccctgaaaatatgggcctgaaattaaataactttcacttaccaaccagggtggtatagggcccttggatgggaggccttcaatatttaagctctaagaacaaaacatgtattgaagacaagttaaaccacacttcctctgaattttcaagtcttagatattcttaatctagactgggcattgcccatctatgcatttatctgtctatccatctgcctacccacccacctacccacctacccatccatccatccatccatccatccatccatctatccatccatccatccatccatccactttcccatacacctacccatctatctatctatatgtatatatgtatatatgagagaaatattttttctgaaatgttttagagtaatttgcagatataatgccccttttcctctaaatacttgtatttcctaaaaacaaaaacattcatttacttaaccacagtactgtcatgaaaatcaggaaatcaacacagataacaatactattttcatatatatatatatattactgctccttgcagagcaggggtaccccataggcagtgtgcctagagtagcctataatactattttttaacctaacctaacctatatgttatcttcaaatttcatctattttcccactaatgttcttttctaatcaaggatccaattcagggtcacatgttgcatttagctgtcaagtcttttatgtcctttttttttccttctgagacagggtctcattccatcacccgggctggagtgcagtggtgagatcatggctcactgcaacttctgccttctgggctcaagcaatcctctcacctcagcctcctgagcagctcagactacaagtgcatgccaccacacctggctaatttttgtattttttgtagaaatggggtttcaccatgttgcccaggctggtcttgaactcctggcctgaagtgatcctcctgcctcagcttcacacagtgctgggattgcaagtgtgagccagcacacttggctttttttttttttttcttttttttttttttttgagacagtctcgctctgtcgcacaggctggagtacagtggtatgatctcggctcactgtaacatctgcctcccaggttcaagcaattctcatgcctcagcctcccgagtagctgggactacaggtgtgtgccaccacacctggttaatttttgtatttttagtagaggcgaggtttcaccatattggccaggctggtctcgaactcctgacctcaagtgatctgcccacctcagcctcccaaagtgctgggattataggtgtgagtcactgcacctggcctccagccctttttagtcttttaaaatctagaacatatctagtgactgttttcactggatatggaactttttaatgtcacattgttgagtgtctggattttgttatcttcctttaaagagtactggtttcttttccttccgcccttccttcctccctcctctctctctctctctttttctttcaactcctaagttgcttgtggatcaccttcatgcttctgaggcttgttttttcaccctggtcatggtaggtctgtagtaacctttcctaaaaagctcttttagccatacatctcaggcacggccctcctgggctcttgactcaatgcaaggtctctccattgtggctgggcagaactcgaaggttcccggtgctgtgtgagctctgggaaccatgcagctcacagctccctgttcttattttctgcccagtatcttgcagtctcatcctacacatgtgcagggtggtattccacaagactccaaggagccccatgcagatttatataagtagctctttctctccaggactccattctttctggtattcttgccctacgaattctagtctcctcagcttccccagactctcatctctgttgaactcagggaagggctcagctcaggcccttcctccctgctctgtgatctgagactgcctccagacagaaagcagatcacaggctcatctatttatcctgctactcttgagggtcataggctggtgctgcctgctgttcgacatctgtaaacatttgcattacatattctgtctggttttctatttgtttagattaggagggaaaatctagtacagaatcaatggcctagacaaaataattatttatttcacaaaagctttacaatgtgaacaccttaatatctatgtaattactcactcactctgcaaacattggcaactcactaagtcattatggacactgcaacgcaacccttgttttcaaggattctatgacctagtaacagaaataaaatccactaacacaaatgtacgtgatatacaaaaacagtatagggtagaatgctataagtgccttaagagtgattacaaacaaaagtctgcaatggtttaaaagagagagagggccgggcatggtggttcatgcctgtaatcccagcactttgggaggctgaggagggtggatcatttgaggtgaggagtttgagaccaacctggccaacatggtgaaaccctatctctactaaaaatacaaaaattagctgggcgcagtggaacacgcctggaatcccagccactcaggaggctgagaaacaagaatcacttgaacccgggaggtagagattgcagtgagctgagattgtgcatgctgcactccagcctgggcgacatagagagactgtgtctaaaaaaaaaaaaagagagagagagatcaatcacttctggctggggtgatcagggaagactgtcttggagaacatggcatttgcacagggcagaagacaacatgggagaaggctgtccctgggcctgtctgcccgccccatggtcctgcagaaggccctgacctagcaagcaggttttgaattataggaccctaagaactttatttgtttttgtttaaaagttagtattatgttaagtgaaagaagtcagtcacacaaagtcatgtcttgtatgatttcatttctatgaaatgttcagaacagacaagttcatagagacagaaaatagattagtggttaccaggggctgagctggaggaattgggcagcaggggaacatagggagtgattcccaacaggtatgacacttccttttttttccttttttttttttttttttgagacagagtctcactctctctgtcacccaggctggagtgcagtggcatgatcttggctcactgcaacctctgcctcccaggttcaagcgattctcctgcctcagcctcccaggtagctgggattacaggtgcgcacgaccatgcctggctaatttttttgtatttttagcatagatgggaattcaccatgttggtcaggctggtctcaaacgcctgacttcaactgatccgcccacctcagcctcccaaagtgctgggattacaggtgtgagccaccatgcccagccaacatttcttgatttaacaaaagtgctctaaaattgactgtggtgatggttgcataattctgtgactacaataaaaaccactaaatggtacacttttaaaatgggtataaattggatggtatgtgaattatatttcaaagctgttattaaaaaaaaaaagtgaaacgtaagccctccttcaaaaagcaactcagaagcccatgaggcctgaactcccaggagccatgggagaacaccgtgtgccttcccgccttctaccccagcaagagcccagccagcggtgcctccctctcctgtgtccacagtgtcactcacatcttcacagccccaagttctgtaagagtaaggacctgagcatcggttcatctggcactcctcccggcatctcatgcagtgacctgctcagtgagagtgtgtggagttggactctgcaactgttcttagaactgaaaactctgctttcctttcgaagttaatgcactgacaacagctgcaactttcaggaacgtgactgagaagggagcagccgacatacactttcattcttttacttttgttattttttttttaatttttgagacagggtcttgctctgtcacccaggctggagtgtagtggcgcaatctcagctcaccacacccttgacctcccatgctcaagagatcctcttgcctcagcctcctgagtagctggggctacaggcatgcgccaccatgctcagctaatttttttaaattttttatttgtagagactgtctcgccatgtcccccaggatggtctcaaactccagagctcaagcaattctcccgcctcagcctctgaaagtgctgggattataggcacaagccacctcatccggcctcttttactttgtacacttctgtattgtcccaatgttttacagtctttattgcctttattacggggaagaaggaagggaaggaggcaagaaacagaatggtccttagaaacattgtgccttggacagagcttttcttacatcaaattataataaataagaacctctcaagattggaaatcaattcaacagtaaaggcttaaaaatctgaaaagctgattttcacaatcggaaacgttacctcttccttggacaaatgcctgaattttgtctgatatcgactgagttctacattcaaacgatggacagtcattttcaatccatcattttcatccaccagttcttgagcttgttttcgcagataaagtaattcaggtgcagcaactagggaaaaaaatttaatattatactataagaaataacatccaatttatccagattttattaaattgcaaatcgtttgcttttctcccctctttcacgctcagaggcaatgaactgtgtgtgcgtgtgtgtctgtgtgtgtatgtgtgtctgtgtgtgtgaatgaataaaagttacaacgttttttaacactgaatagttaacgttatattgaaagtttgtggaagtttttgcatgtacaataaagtaaaataaaaatttcaagttggaaaggaatagtcattgtttcagatgacataagaatatgtgctttgaaaaatcatacagaggccgggtgcggtggctcacgcctgtaatcccagcactttgggaggccgaggcgggtggatcacgaggtgaggagatcgagaccatcctggctaacacggtgaaaccccgtctctactaaatatacaaaaaattagccgggcgtaatggcgggcgcctatattcccagctacttgggaggctgaggcaggagaatggcgtgaacccagggggtggagctcgcagtgagccgaaatcacgccactgcactccagcctgggcaacagagggagactccatctcacaaaaaaaaaaaaagaaagagaaaaatcatatagaatacatggaaaatgtattagagctaataaccttcccacataatagcaatgtcctattagaaaacaaaacagaaaatagatcccacaaggtaacagcacaaataatatatagtatctaaaaataaatgtgcctaagataagaattatgcagggtctatgtgaaaaaaactgacaccaccttacttaaagctatattagttttatataaatagaaaaaggtatagagaaaatattggtgaatatttatataaccttagagttaaaaatgacttaataccaagagtgtaagtcataaaagaaaaacattttattgatttagcccaattatcaacaaactaagaaaatattacacctatgacaaagggataaaatctttcatatgtaaggagttcctgcaaatcaataaaaagaagtcaagtgtctcattgtaaagtgggcaacttggccatgatagtggctcatatctaaaatcccagtgctttaagtggccaaggaggaaaaatccttgaggccaggagtttgagaccagcctgggcaacacaatgaggcctcactgctataaaaaaaattaaaaaaaaaaaaaacttagccaggcatgatggcgtttgcctttagtcccagctactcaggaggctgaggtggaaggatcacttgagcccaggagttcaaggttatagtgagctctgaccaccccactgtagtccaacctaggtgacaagagtgggatgctgtctctaaaaaataaataaataaagtgggcagctttatgaaagaaaaagaaaatgacttgcaaagatatgaaaaaatattcaagttcaataataacagaaatacaaattaaaatactatttctttttttaacctataaaagtagcaaggaaaatataatcattggtaagtctacggtaaaggaggagcttttttatgcttctcttagggataaaaactgaagtgaaatatatgtaagctaagcatcaagttccaaaagaagtattggaatctctgttttgtttttgtaaattcagcttctttccaacctgaggaatttctttagtgtaataatgatatagcagatgaaatcaaatctcaacaaacataaggatattaacaaaaaaacctgaaatattacaacataaattaccaacacaaatatcacaacataaaatattaactctcaaaataattgagtgaagtcctgctcattcctctaataaaggcactctgtctgtccccaccttcctgtgacgacgccttctcagcctctttgagctttctcttctctttttccattcccttaagttttaactgtagttctttcattgcttgtttcattgtgtttagttcaagggtaaggctttgattcatattgtttaggtccatattttcttcttttaatgcctcaaacttttctctggttatttctgtatatctttgacgtgctctaccagttatatctgaaagggttcaggggaaaattttacaatgttaattgatgttgacaatgttacatcaaaatcaactgactttgttccaaaaaccacatcaggcctggtgccatgttctttggtccctgggaagggaatggcttctacaggaaacagtaagtggcctgatgaagtcacagcgggtggcaggaagagaggtactgaggggaggccagaaagggaggccagagctgcaggaggccgtgcctattgtgatgtggcatggaaagttcatcttgcagggcagcaggagccagcagggctttcaagcaaaggtgtgagaaggaagaggctctgctcttgggtgaatccctcaggccagcagggaagaaggcaggttagaatgaggcctagcccaacagctgaggggcagcactagagtggggacacagagaaaaggacacatgagagcaggactcaggggctggtggctggctgggtgcgggcagtgagagagaagcagacccaggatgaccacccaggtctgtgtctggcagatgctcccccagatgaggagcacactgtgaagagcaggtggggatggaagatgaggagaggcaggcttgggttggtacagaggcccagagtcccagggcagcctctgctggggagactgacgagccactggcctgtgggcagcacctgaaggcaccagggtgaggagaaaaccgaggtcacataggaccttaagaaggaagagcaagaaagtggggtggaaaccagcgctgttccacggggagatgtgctccgaaaggtcacaggaggtgaggctcccatgggccctggccagcgcacctcccaggggagggagaggcggaagcagagcttccacacagacgagggcaggatggctggtggctccagagagcctggcccaacctctgacacacacatatccaatccctaacatgcaaaaggtgaggctcagaaatgggaaactccacagctacatagaaacaagggaaccctgagaaatcccagagataaaacagttgagatgagaatgaagatgggtgccaagcctgaaatgtgccaagagagggcagctagaaaatggggaggggtggctccagggatacaccttgccctggtaggagtggagacacaaagtggcctagaaagagctgatgaggctgggcctggtggctcgcacctgcaatcccagcactttgggaagctgaggcaggaagcttgcttgaggccaggagttcgagaccggcctgagcaacatagcaagagcccatctctacaaaaatcaatcaataaataaaattatatttaaaaagaagcagcttgaagcagctgatgagctgttgagttagataaccagagtgggaatagcaaggggttaacccacctgacccaggcagcaacagcagaaatgtgtgcccctcctcaggcagaacacacaggccctgagggcagaaaggcagggcagggggctggagaaagccaggaggaagaggggtccccacggatcccggtgggcctcacatcctgtccatccccatcagttgctggaggcagcagtcggtacagcctggcagcctgctggctctccctcttcaggcagggtgcagtaaacagaggtagcatccccatgtgggccacagggaatctcagagaccccaagaggtatcaaacagcagagccagagaacaccaatggcaagtgagagaagagaaggggctgcaacacaaaccctaagactggatgcgcatggttacaactttcagagagacgtagtcagtgtcacagaaatcatggaagttaacgtttgattaacaccataaactgaaaggatgggctgagccgcaggatacacatcatgaaaaatgaatgcatggcgcagaagttggagccccagcaatcgcccagaatacagcattgaaaatgctgagattgaaagggtgcaaataaagttaatctgacgcggaggagacttaaaccaggattttcagagcagtgacactgatggcagcagtggcccatctagagtggccaccgcacagactctagagcagggaggtgtggcccaagcctcttgctccatggagcaggcaggagccccggccctccctgggtgctgctgcagctgcccaagcccggctgcagacccgagaatctctgtgttcttgggggcccaagaaggcccccaccacccaccataggctccgaagtgcctgatcccactgcctggcttcaccccactgtgggcacctgctccagaggtatggtcagggctgcatgctccacagagccatcaggagccggggacaagcgggagccctgccccttctgagttggtggggcaggagctcatggggtgctgctacagttgccctcccatgtgtaggacctgggtgtctctgcagtctgcaccctcgggggcctgggaaggctcccgtgtccccgcaggcttatgggtgtttgctctagctgcctggtctctccctgctcctggtgcctgctccagtcttgcagcagggttggagcggggtttaggccaagcctgggcactgtcacagcctggctgggagtgtgcatactcagggcagtactgacacgacagcgccctgccgcctcagccccctccagactttgggcacccatgagcacaggagggaaagacaagggggtgctgaggatggctctgcactggcctgcagttgccccttggtgtgagcagcctgggtgccatggactgggcagcaggagggagacaggttcctgggcagaagcaggcaggtccccggtgaggccccgccttcaggtcggagagggcctgaaggctggggaccgggttgcctgtcccgtgggactgcagtaggaacttatggtgccttttccaggcccacccatggccacccatggaccaatcggtgcgcacttcctcccttctgaggcccataaaagccctgggcttagttggagcagagcagatgagatgaccagctgcagagaggagttcccctctctgctgatagctggagatgtcagaggaccagcagcagagaggagcaacccactccagggcctcctctctactaggagctggtcagaataaccagctgcagagaagaacaaccctctccagggcttcctctttgctgagagctgcagagacagttgggtgacctgccttcagagaggagccatcgactccaggggacctcctctctgctgagagctgaacacttaacgggacgacctgcctacagagaggagctacccactgtgggtctcctctgaactgttctaacatgcagtaaagctcctcttcgtcttgctcaccctccacttgtctgcttacctcattcttcctggacgcaggacaagaactcaggcaaaggcacactggcaccacagacatttccgaccagaaaagcgacaccccaaagatcttgtaacaatgtgggacctaacagcaaaaattataacctccattttggaagccactgaagctccccaaactgttcagggggcataacccataaagcatctctagacctctccctctgccttcagcctcagagcagagcccataactgcacctgccttcccagtacggatcccagtacatcatgggtccactcctcccactgggatcccagcacatcccacaggtcctccttccacccccaggatcccattacatcccacaggtccacctcccttcccccaggatcccagcatatcccacaggtccacgtccccccaggtccaacccccaccctcccaggacccaagcacatcctgtatggacatacgtccactacctagtgtttggaccctctcttttgaggcaagggtgaaagttcaacaactaatacaagaaaaagaaaatgtaatctttattttcagataaaattaatctggatattctccaaaacaagcttttcaatcataatataattcaaaaggcaaatacctggggagggtggaggtttctcacataatggaggtttttcatcctaggaaagaaagaacataagaggaataagtgcagagcattagtgttttataaagtggacacacgcagctaggtcattagacagcaggtatataagcatgctttatttccttcattttgactcttgttctttgtttgttttagctttcaaaactttaatatgtactatttctttttttccttttttaagacagggtcttactctgtcacccaggctagggtgcagtggtgtgatcgcagctcactgcagcctccaactcctgggctcatgaaatcctcctacctcagcctcccaagtagctgggattacacatgggccatcacacctaatttttttttttttttttttgtagagatggggtctcctgttgtccaggctagccttgagctcctgggctcaagggatcctcctaccttggtctcccaacatgctgggattacactgtttcttatacctgaatctgagaccttaagtgtcttcccctctggtgggctctctgaggctataaaggaagtcctgcctgagctttcttcctgcctttctgcactgagttcagtgactgtccttacaggtagatcccgtgagtagcgggctgtgggctcacgttgaaaagcatgtgctaggtagggctgcaagtgctgagcagagatgccctcagcaaactccagccaggcctcttctcactgggatgggcaaaaaggaccccatcaactgcagggaagcacatttgcaaaatgctgagaaaggaacagtaagatattgcttctcaaccccaaacctagaggaaagggaaggctgtgaacttttgttaatttttccttacatggtggtgtgatattaagtttctaatttctgctgacaaagtagacaaggttataaattaactctgcagagaaatgtttaatttttaagttcctatgacatcgcacaatgaaaaacttaagttagaactatttccatgtttgcaaattagttattaaaattctcaggccaggccaggtgtggtggctcacacccgtaatcccagcactttaggagcccgaggcaggtgggatcgcctgaggtcaggagtctgagaccagactggccaacatggtgaaatctcatctccattaaaaatacaaaaattagctgggcatggtggcatgcacctgtggtcctagctactcgggaggatgaggcaggagaatcacttgaatccaggaggcggaggttgcagtgagccgagactgcgccactgcactccagtctgggtgacagagcaagactccatctcagaaaaatatctcaggctaggcacgtcacatcatgcctgcaatcccaatgcccttgggaggccaaggcaggaggatcgcttgagcccaggagcttgagaccatcctgggcaacataacaagaccccatctctaaaaaaaaatttttttttaattagccaggagtggtggcatgtgcctgtagtcccagctactcaggagactgaggcaaaagaatcacttgatcccaggagattgaggctacagtgagctatgatcacaccactgcactccagcccgggtcacagagggagatcctgtctcaaaaaataattttaacaaaagataaaattgtctattcattccacattcattttaattataaagtagtttctaaccctttaatacattactttcatcattaaactatggaaaatatcaatttcctcatgttttaaaagtatttaaggccaggcacagtggctcatgcctgtaatcccagcattttgggaggtcgagatgggcagatcacttgagctcaggagtttgagaccagcctgggtaatatggtgaaaccccatctttatcaaaaatacaacaaattagctgggtgtggtggcatgcatctgcgatcccagctactcgggaggctgaggtgggaggatcgcttgagcctggaagacggagaccgcagtgagctgagattgcgccactgcactccagtctgggtgacagtgagacccccttctcaaaaaaaaaaaaaagcatttaaaagaaatattcaacaggaaagaactcttaagggaagatttatttttgccccaaaatcaccgccaaagtttcaacaccaaagttgttgaaaatttatgaaaaattatgataaaaactctatttattgagaaaatcagtttttaaaaaaaatgatcttacctttaaattcagaacagggtgtttaccatctgatgaagaaaaagagagagagataaacttttaaagtagataatgaaatatgacaactcagaaagtacaatcatagaaattcaccttctacagaggagctcgacaaggcccagaacagggataaaattcacagggtcacagggcaagtgggtcccagagccaggctggggcctgactctaaattgtcatctctctcccatacccatgcctgaccaccatccgtggctcacgtggctgcagaaccaaagccaaactcttcagtgtctccaagcccttcccatgccaggcttctcctctccttccaacacccctccccatcactctccacacatcttcccatgccgggctcctcctctccttccaacactcctccccatcacgctctatacatcttcccatgccgggctcctcctctccttccaacacccctccccatcactctccacacatcttcccatgccgggctcctcctctccttccaacactcctccccatcacgctctacacatcttcccatgccgggctcctcctctccttccaacactcctccccatcacgctccacacatcttcccatgccgggctcctcctctccttccaatactcctccccatcacgctccacacatcttgcccaccactccctggatgggccaacgcatactcctattggcctaccctccctagatgcatcatccaacctggtcagaaaaatagttgttccttgaagcaaactgtctcaacgacagagaggaaaacaaatctcacccacttactcatcttccacacatctgtaatccaggtaccctaggaagcaggtgatcttacaccccagtttgcctgtacacattcatgttgtaaaaagttggacatcgagttgcttttttttttttttgagacggagtctcactctgtccctcaggtggagtacaatggtgcaatcttggctcactgcaccctccgcctcccaggttcaaatgattctcctgcctcagcctcccaagtagctgggattacaggcatgcgccacgacacccagctaatttttgtatttttagtagagacagggttcccccacgttggccaggctggtcttgaactcctgacctcagataatccacctgcctcggcctcccaaggtgcagggattacaggcgtgagccactgtgcctggccctgagttgcttttaactttctactattaatttgcagagcagaaataaccagctgaaaataaactggaaacacatgcaaaaaataggtgaaaaaaccctacaaaattcagacaacagaagaaaatgctagagatacatacaagattctaaatctacttcctggttgggcacggtggctcatgcctgtaatcccagcactttgggaggctgaggtggatggatcacttgaggtcaggagttcaagactagcctggccaacatagtgaaaccccatctctactaaaaacacaaaaattagccgggcatggtggcacttgcctgtaatcccagctacttgggcggctgaggcaggagaattgcttgagtttgggaggcagaggttgcagtgagccaagactgtaacatgacactccagcctgcgcaacagagcaagactccatctcaaaaaaagaaataagtaaataaataataaatctactccctgatgcattgagcaactcgtcactgaagagctcatttttggccaaagtcatcttgatcaactgtttttaaccaaactgctttcagtcaaatgtccaggggcagcctggactgctctcctgcgttggacaccaggtgaaatcctgccctgtccttctgagttcagcttgatgaaccctcctttccctaccaccttccctaactgagagacaaccacctctactgcccaccttagcaccccagactacggtttgcaatctgcatctcctcctctgcagctgggatgcgaggggaaaggcctgtggctctatcatctctgacacacggctggcactgaacaaatttccaatgagcaaatgtttaaagtgatacaataagaaaaaatatatatttttaataacacctttacaatagtcttgatttggtatcacacaatgctacctcagatctgactgctttcatatttaatggagtcttctatgtcccccttaaattcttcacaaaataaaattgggggagcagggagttacatgaaatagaatggcaaaaggttgacagctggtcgggcacactggcacatgcctgtaaccccagcactttgggaggccgaggcaggtagatcggttgagcccgggagtttgagaccagcctgggcaacagagcaaaaccccgtctctacaaaaaataccaaattagtcgggtgcagtggaacacacctgcagtcccagctactcgggaggctgaggcagaagaatcactcaagcctggcaggcaaaggttgcagtgagctgagatcacgccaccacactccagcctggacaacaagagcgaccccgcctcaaaaaaataagaaaattgttgacagctatagaagtggggagatgcataggtggacaagtgggagttcattttactagtctctctacttttgtacacattaaaaatgatcacaataaaaagtttttaaggggcaattcaattttcccaaaggaaatcatgctattttatcttagtcatgaacttttcagaaaaagagtctcataaagattaaacttacaatttacagcatcccaaattcatgttgtatttaatgtacatttaatgtacacgcagttcacttggttctgtgaatctactttgtgtcctgtgttcttatttatcatttctcaaaaagatttccagagtcctcaccctcctcatttctattacctatatgggtgagggggatagacataaaataacagcaaaaggcttcaatactgggcatactcctgctgcatacaaggtgtcatgctgggtctattccagtcttttttttttttttttttgagacagggtctcactctgtcacccaggctgaagtgcagtggtggaaactgcactgcagcctcaacctgccgagctcaagcgatcttcctgcctcagcctccagctgccaggctcagatgatcttcctgcctcagcctccagctgctgggctcagatgatcttcctgcctcagcctccagctgccgggctcaagtgatcttcctgcctcagcctccagctgccaggctcaagtgatcttcctgcctcagcctccagagtagctgggtctacaggtgtgtgccattatgccggctaattttttacatttttgtagaaacggggtctccctgtgttgcccaggctggtctcaaattcctgggctcgagcaatcctcctgctttagcctcctaaagtcctgggatcataggcctgagccactgtgcctggccctattccaatctttatagaaagaaaattcacatgacatgaacacattcttgctgtcaaaaattttaatgacacagataaatcaaaattcacccatgaccataatccctcgaaaccttcccctctccagaggtaaccatggttatcaactgggtatggttcttttcagatatatttgagcatataaggatgtagtggctcatgcctgtaatcccaacactgcgggaagccgagatgggaggatggtttaagcccaggaggtagaggctgcagtgagctatgatcacaccactgtattccagcctgggtggcagagcaagatcctgtctcaaaaaaaaaaagtcaaaccccacaactcaccacgtttcacatgcctacatataagagacattaggtagtggggagggagagtagcatgtgcacaggtccagtggcaggaaggaacaccacagagttgaggaaataaaagaacagcagagtagctggaaagcagtcagcaggggctggcaggccaagcagatggtgggacaccatggaagagatccaatttaaaagggtctggggtatgtgggggtgtgaagggacgcatgtgggggtccgtggacgtgcaaggggacactaccagctttgtgctttgaaaagatggctctgggccagatgaggtgtctcatgcctgtaatcccagcactttgggaggccaaggcaggtcaaatgtttgagcccaggagttcaagaccagcctgggcaacatagtaaaaccctgtgtctaacaaaatacaaaaattagccaggcatgatgatgcacacctgtagtcccagctattcaggaggctgaggtgggaggatcaactgaacccaggttgaggttgcagtaagccatgatcataacactgtactccagcctgggcaacagagtgagaccctgtaaaaaaaaaaaaaaaaagactcttcttctgactgaggggatgaatgaatgaagtcaaatggttacatggcatagaagctgcgaaaggaaacctgggcgcagcacacaacgaatgatagcaaactggggagcaggctgtgagtgcttcgaagagtaaagggcctagactgaggagatgacgggtggatgcccaggaaggcaggaggaaacgagatgtcctgagcccagggagaaggtatgttaaccacgtggtatgctcctgagacatcatcagatgaagccagaaaaccatccagtgcacttaactacatgaaggtctctggtccagtggtgcgatggggagggaagccaagctggagaggtatgaggagacatggagagggagaaggcctggagaggtgtatcacttgacaaagctgttaaggagaagaaggaggaagtactagcaagaggggactgtgggatcaaagaagggtctgcagagaatctaggaaaggggaacagcgtccacgagcatgaatttggcagctctgaccaacggtacaagggccttgcccaaagtgtgtttggtcttcttggcagaggtctcgctagagtgcagagggatgcaccaggtgatgaaagcttcaggctttagacactaatcatcactagcactgatggaagccactgcactttacattgtcacttcatttatgagacagacactctagattgaggagaaaatgaggtaagtaagttagccatgcctagaaacgacagagtcaaggaccaaaccaccaaaagccagggttcctcatgtgttgtccaaggatcacccacaacagactcctctgtgtacttgtgaaaagtacagacccttcgagaccagtctgaccaacacagagaaaccctgtctctactaaaaatacaaaattagccaggtgtggtggtgcatgcctgtaatcccagctactcaggaggctgaggcaggagaatggcttgaacccaggaggcggaggttgcagtgagccaagatcgcgccactgcactccagcctgggcaacaagagtgaaactatgtttcaaaaaaaaaaaaaaaaaaaaagtacagacctctgggcccagccctgagccactaaattacagtttggggtctggggtttttcagaagtatgcaggggcttttaatgcccaccacaaaccaggcatcactgcaggagctgcaatccctcccaaccaccacctgtgtgccaggtgcacgttcccaagtatgtgggtggccacggcctctcatctccaaatccaccttcatggccagctcatgttactgcagcatttccacccagccagttggtaccatggaaggcttcctctgtagagggtgctggagagacgctggaggagctggggctttgctttctgattccagcttcctctggctcttccttccatgcattaatttctttttttaatttctggttttagagtccaagggtctcactatattacccaggctggattcgaactcccaggctcaagtaatcttcccgccttggcctcccaaggagctgggattacaaatgggatttcatgcgcagatcctttctttaattttttgggtggccagcaacatgcagtacctccccatggtggcttctcctggccccctatcccagtgagtttcattagggcagcccctcagcaaacttcttggccacccggcaggccacagctacatcctctccaggaaggtgtggatcttgggttctggctgaggctcctccagagctgcttcctcctgaagcatcagccctaggagcagtggctgctcccctgagctgctactcctgaattcttcagtattctctttactccttagtaggcaatcctgttgttattattattattatttttagagacagggtctcactctgtcacctaggctggagtgcaatggcactatcacatctcactgcagccctgacctccttcctgggctcaagtgatcctcccatctcagcctcctgcatagctgggactacaggtgtgagccaccatgcgcagctcccaaacctgttattattaatcattctttatagtaaattttccctcttcaagtcattgtgtgtgttctgactcctgattggaccttgactgatatatgctacatcaggccacacaatgcagatgttacacaaggcaggagagaaccaaatctggggacatagaaagacatttggcatgtgttgtgagatgaaagaaaggtaacaaaacagcatgcactttatatacatatactctctaaattgttaaaaatcttatctgtgggagcacaattaagtgtgtttagctttatgatatggtctggctgtgtccccactcacatctcatcttgaattgtagctcccataattccctcatattgtcggagggacccagtgggagataattgaatcatggggcggtttcccccatactgttctcgtggtagtgaataagtctcatgaaatctgatggttttataaggggaaacccctttctcttggttctcattctctcttgtctgcttccatgtaagatgtgcctttcaccttctgccatgactgtgaggcctccccagccacggggaactatgagtccattaaacttctttttcttgataagttacccagtcttgggtatgtctttatcagcagcgtgaaaacggactaatgcactttatatatttatgtattttttttacagtgagacagtattacttttgtaatttaaaaagagatgcaccttttacataaatctaatatttaaaaaatacgccaactgaccaacaggtgttttctggccccaggattatgaggctggcattctgtgttccctgagaaatgatttacagaaacgtttccctgagcccgagcaactctagggctgctgataaagtagttattggttgtccacttgatgcctggctctccttgtcacttctcaaatgtgagccacctcttaggaaactgaaaacttttccctacctttgttataacatgctgaattctctcattgggataatcaaatagatatatgtccacgtactcattcacccaacagatctttcctagtgggccactgtgggccaggtctttccccaagcactgggactagggagaccctatcctatccctacctctattgcttaaacccaggagttcaagaccagcctagttaacatggcaaaaaaaaacagcaccttgtactttaaaaacaacctaatatccagaagcaattgactgcagaataacttttcctttttttttgagatggggtttcactctgtcactcaggctggggtacaatggtgcgatctcagctcactgcagcctctgcctccagggctcaagcaatcctcccacctcagcctcctgactagctaggaccacaggtacatgccaccatacctggctacttttttgtattctggtagagatgggatgtccattttttgtagagagagtctatgttgcccaagctggtctcaaactcctaagctcaagagatctacccaccttggcctcccaaagtactgggattacaggagcgagccaccacacccagccttattttcttgagacagggtctcattctgtcacccaggctggaatgcaatggtgcaatcatggcttgctgcagccctgaccttccgagctcaagtgatcctcccacctcgcccttctgagtagctgggactgtaggcgtgcaccaccttgcctggctgatgtttttatttttactttttgtacagacgatgtctccctgtgttgcccaggctgctttcaaattcttgagctcaagggatcctccagccttggccttccaaagtgctaggattacaggcgtgagccaccacacctggaccctcattttcaataaaaaataaatttcaattatattcctagttaaaatcacagagctacagcatgaaggggcaatgggtatgttttcctaaaaataagcaatattcattatgaaaaaatgttcttatattttataaaaattgtggttttttttttctacctttttgttgtgtccgctgtggtgcaggaggggagcctggaaacccatcttgatgagaaatattttcatcgtcttcactgttcacctcatgtaacaatggcacctttttgttataaaagacaaaggagcaaaaaagtgagaaaggtaacctttatatacagcatgtcctcctaacaaattccaacatctttcaaaccttccccactgggagcttcctccatgggcacttcagctgctttcctcagtgacacacaaaaggcgtatatcaggtggggctggatgacacttccaggccctcaggaaaagcttagggggcaaaggcaacaccattaaagttatgctaaggccactgagagctccacatcccagccatgttgccagggcagcttcccttcctcatccctgccagggaccacccaatgccactccaccctggtactgacaccatgttactagtttccccccaccccttttttttgagacagggtctcctctgtcacccaagctggagcacagtggtgtgatcacagctcactgcagccttgacttcccacgtgcaagcgatcctctcacttcagcctctggagtagctgggaccacaggcgtgcaccaccacaaccaggtaattttttttttattttttgtagagacaaggtctccttatgttgcccaggttcgtctcaaactccagggcccatgcgatcctcctgcttcagcctcccaaaatgcagggattacagatgacagccactgcacccagcctgtgttaatcatttctatgtgggacaagcagtgctgacctcccctgggaggactctcattgaagcctcctatgttcaccaattatgtaagtccactgtaaatttcatttactgagggactcccctctactgactgagagtagctcctatataggtaaccattcatgttagctatataggagctgctgaaattttgtttcatcccaacatggcagggacacagagttgtcctttagagaggcccatgggccaggaatgggacctgccgctgatgaggaggagatatttccattggcaggagcctgggggtagggacagaggctgcctaagaggaagagaaagaacagtgaagcaggtctttttttttttctttttttaagacatggtctcactctgtcaccctggctggagtgcagtggcgcaatcatggcttgcagcagcctttacctcctgggctcaagcaatcctccacctcagcctcccagtagctaggactacaagcgtatgacaccaagcccagctaatttttaaattttttgtagagatggggtctcagtatgttgtccaggctggtcttgaacttctggcctcaagtgatcctcctgccttggcctcccaaagggctgtgattacaggcatgagccactgcactcgacctgaaccagttgttacatggtaaactgtgactggcgctgtctgggtgggctgccctttggctctcctgattcttcagtaaaatcttgcttttgtgatcagtttggcttagctgggctgcactgcaggcaatggaagggctgtccctggggctgacaaggaggtggtggcagggactagcaagacgcccatgagaaggggcatttcagagtaagagctaaggctgctacgtccacctgtctctgtggacatggttccaagatgacctggctcaagagaagcaaacaggtctcccaagatactcatcatttgaagaaagaaaaagtaaatggccccgtacttttttttttttttaatacagacaggatctcactatggtgtccaggccagtcttgaactcttgtcctcaaatgatcctcccacctccacctcccaaagtggtgggattataggtgtgagccaccacgcaaggccgacctcaagcttttttatctcccaggaacaaacttccttgttcaacctgtcaaaaatatattaagtgactcactattctcaaggaaatgtgaaataggtaagatgacttaaaaagcattaggggccaggtatggtggctcacatctataatcccagcactttgggaggctaaggcaggcggatcacctgaagtcgggagttcaagaccagcctgatcaacatggagaaaccttgtctctactaaaaatataaaattagccaggtgtggtggcacatgcctgtaatcccagctactcaggaggctgaggcaggagaattgcttgaacccaggaggcggaggttgcagtgagcagaaatcgtgccattgcactccagcctgtgcaataagagtgaaactctgcccccttcacccccacaaaaaaagcattaagaagatgctcaatatggacaatcgtttggcagtatctactggtactaaagctgatggtacatataccctatgaccatacacataccattcctcagtatatacccaccagaaatacacaaatatgtacatcaagggacacatcgccaaatgttcacagcagcactattcctaagagtcccaaactggaaccaattaagtctctgtcatcagtaaaatgaataactgagtggcacggttgtacagtaaaatatacagcaatgagaacaaacccgcccctgctatacacaataactgaagactcccaaactccaaataatgcatatcgtctaattaaatgcatgtaaattttcagaacaggcaaagctaatctcaggttatttttaaagattaaagctaatcttggcaatggttaactctgtgggaagtagtgactaagaagaagggtgatttctagggtacaagtaatttttttttaatctgagtggtggctactttttgaaaatgtatcgaaatgtgcacttatgatttactcacttcttgtgcatattttatatatcaataaataagtctactaaaaacataccttcataaagaatttgtgatactttatataaacatactttaaaaggcttggctgggcgcaatggctcacgccagtaatcccaacactttgggaggatcacctgaggtcaggagttcgagaccatcctggccaacatgatgaaacccaatctctactaaaaatacaaaaatttgctgggcatggtggcgggcacctgtagtcccagctacttgggaggctgaggcaggagaatcacttgaacccaggaggcggaggttgcagtgaaccaagattgcaccactacattccagcctgggcgacagagcaagactctgtctcaaaagaaataaacaacaacaaaaaattatatatatatatatatatatatacacacacacacacacacacacacacacacacgcacactactacagttgtttacttaaacttgtagtaaaagaataaaaacacaaacttccaggatgcactccaaatccaagaaaagatgagtttccaaggagggagtggggttaggggacaaggcaacatctaccctaatggtaacattttattatttattattttctacttttcacatgttaaaatttaaaaattttcctactacacatggctcctaaagccaccctaacagacttgcctaaaaaaacaaaatatctgtccttctagcaaggaaagagtctctgtaggtcactgtatctctttcttccaagggaaatattgtagtaagctttccctctagaacagtggagagatatgactctatgtgtaacatcggtacaaaataaccagccggcaagtgtgcgggtgaggagcagtgggactgattctgagccctgcagagctcgacaggagcacagttgtccatattgagctctgggcagtgtctgcctattccagagctgcttgctatgagaagcctaattctatgtgtgaaagtctgtatatgtgggaaaatgatggtgagttcatgaaacagccacataaggatccctcaaaataagctcctgaagaccatttaaaatgtattttagggccaggggcgttggcttatgcctgtaatcccaacactttgggagcccgaagcaagaggattgcttaagcccaggagttcaaggccagtctggctaacataacaagaccctggccctatagaaaaaaaaaaaaaaagccagttgtggtgccgcgtgcctaaagccccagctactcgggaggctgaggtgggaggatcacttgagcccaggaggaggtggctataatgagctaggatcgtgccactgcactccagcctggggacagtgagaccccatctcaatttaaaaaaaaaaaagtgttttaatatagtaggggctaattaatatacatataatcaataccggtgtagcttaatgctgctggtctatatgtacagacactatgaataacacattataatgatggtgaaaaaaagaaaaaggggctaggcacagtggctcacacctgtaatccaggtactttgaaaggctgaggcaggcggatcgcttgaggtcaggagttcaagaccagcctaggcaacatggagaaaccctgtctctacaaaaagcacaaaaaatagccaggcatggtggtgtgtgtctgtagtcccagctacttgggaggctgaggtgggaggatcacttgagtccaggaggttgaggctacagtgagctataatggtgccactgcactccagcctggaggacagagcaagactctgtctcaaaaaaaaaaaaaaaaaaaaagaaaagaaaaagaaaagaaatgaaaagaaagaaaaaaataaaggaaaaagggatatggtgctatattttgccattaaagaaatgtcattatctagtttccaaaaccctgggagcagtttaaaaatcgggattcgcagagcagctggcagtggagaagtatgtttccttgaatctctctgtgtgcagtgccctgatgtgtgacagggcaatgaagggaattcctcagcgagtcagtgggggtcagctaagataaatgcacacaggagttagaaacgggagcgctcacagtaaacactcaaagcacgtcagctcccattgagacacgcatgacgatcttccccgtcaggcatgaatttaaagaaaggctgcagtgtgcaaaatgataccataaaagtgataggaaatttagcttccaaggtcaaagaaaagaacgagattgctaagctgtgaatggaactccacattaacaatatgaagatgttaatctttgtttttgcaagataaaggaaagaagtttatgttttaatctaaccagatagaaatgaggctggacacgtttaaaaaaataagccccaaagcaaatgctatcaaatgcagaatagagagaagaaatccttagcaatgcactaatttaccaaaagttaacatcagggtgaatgtcaagaagaaaactgggaacatagaaaacacctgatttctgtgtggcacagcgtacaggtcatcactgtggcctcctctgtcctcccgggcactgacatcccccaattccttgccgctggatgacagctgagtttcaatgtcctcttcgtccccatagtccagtgtttcaaaggatggcaaagaagatcttcttcccatctcactctgccaatttggcctgtattagaatattcatggggaaaacaaacaaaaagtcacttaacacttgacactgataaatatctttttttttttttttttttgaggtagagtcttgctctgtcgcccaggctggagtgcagtggcacaatctcggctcactgcaagctccgcctcgtgggttcacgccattctcctgcctcagcctagtgagtagctgggactacaggtgcccaccaccgcgcctggctaatttttttttttgtatttttagtacagatggggtttcaccctgttagccacggtggtctcgatctcctgacctcgtgatccgcccgcctcggcctcccaaagtgctgggattacaggcgtgagccactgtgcccggccagtatcatgtattaaatgcactgcctccaagtccttaccataaatgtgggatactacaaagtacacagaagctaaaagattaaattttccaccgtcccatctctttgtacacttggcatatccttctagtttctgtttttagagttactgcatacatatacaatttgtcttgttatgaataagggttttttgtttttttgttttttttttgagacagggtctcactctgtctcccaggctggagtgaagtggtgcaatcatggttcactgtagcctcaatctctctgggctcaggtgatcctccagtctcagcctcccaatagctgggactaaccaagcccagctagtttttgtattttttgtagagacggggtttcaccatgttgtccaggctggtcttgaactccttggctcaagggatccgcctgcctcagcctcctaaagtgctaggattacaggcatgagccactgagcccagcctgttgttattattattgttattattattttgagacagagtctcactctgtcacccaggatggagtatagtagtgcaatcttggcttactgcaacctctgcctcccgggttcaagtgattctcctgcctcagcctcctgagtagctgggattacaggcactcgccaccacacctggctaatttttctatttttagtagagatggggtttcaccatgttggccaggatggtctcaaactcctgacctcaaatgatctgcacacctcggcctcccaaagtgctgggattacaggcctgagccaccatgcctggccccagcctgctattaataagtatttttattttttaaattgagacagggtctcattctgccacacaggctggaatgcagaggtgcaatcttggcttactgcagcatccacctccccagctcaagtgatcctcctacctcagcctcccgagtagctgggactagagatgcactccaccatacccagctaattttttgtttgtttgtttatttgtatttttagtagagaaggggtttcaccatgttgcccaggctggtctcaaactccagagctgaagagatccacccacctcaacctcccaaagtgttgggattacaggtatgatccactgtccccagcctattaatgagtttttatagtcaacattttaaaaggtaggaatccactagatataccagcttaaccagccattttccttgcttaggtggggtttttttccttcactttccattgttgtagataaccctgtaataaacatctgtgtgcagataacccctactgtatttaaggttactcacataaaacaaaccgccatagagtaaattctttttttctttatcttttttatttgagatggagtctcgctctgtcacccaggctggagtgtggtggcgcgatctcagtgcactgccacctccgcttcccgcgttcaagtgattctcctgcctcagcctcccgagtagctgggactacaggcgcctgccaccatgcctggctaatttttgtatttttagtagacatggggtttcaccacattggccaggctggtcttgaactcctgacctcaagtgatacgcccgcctcagcctcaaaaagtgctgaggttacaggcgtgagccactgtgtccggcccatacagtaaattcttgagtcaaatggtgtgaacattttgtgtctacatacatactgcacaaaatcatttctccaagctataaatacactggtaataattttctaaaacttgccaaaacaacttaaaacccactgtctaaatttgcatttgttactgagactgaatgtttttccatatacttgtgttcaggtcctttgtctgttttacttctggtatgtccattccaatttggttcttttttttttttttttttttttttgagatggagtctcgctctgtcccccaggctggagtgcagtggctccatcttggctcactgcaagctccacctcccgggttcacgccattctcctgcctcagcctcctgagtagctgggactacaggcgcccgccaccacgccagctaattttttgtatttttagtaaagacagggtttcaccatgttggccaggatggtctcgatctgctgacctcgtgatccgtccatctcggcctcccaaaatgctgggattacaggcgtgagccaccgcacccggcctgttttttctttttttatttttgtttttttttttgagacagggtctcactctgtcatccagggtggagtgaagtgacaagatcatactgcaactttgacctcctgggctcaagtgatcctcctgcctcagcctcccaagcagctgggactacaggtgagcaacaccatgccaggatgatttttgtatttttttgtagagatgggggtctcactttgttgcccaggctggtctcaaactcctgatctcaagcagtcctcccacctcagcctctcaaagtgctgggattacaggtgtgaaccaccacacttgacttccattccaatttgaaattactaaaattaatctactaaaattaaagtcctgactttgcttttactataaatgttttttctgttctattaatattattttgcttatataaatttcttaaacataaaagcgattaaaaaggtttttttactttctaaattcttggtgtaaaagcaaatagcagtcatatccctgaagaggtgtgataagactggatattggatttcacagtcttatttgtgtgtctatagagtatagtccttcattcattaggaatttattttagtgtatgacttaggcgaggctcaaagctgatttctaatactgctaatcaatatagcactgaatgctttccttcccctttgagctgtgggacaggctttattaaagattcagtatgcttgtagaaacactacgttcacctcagggcattcctgggcacctctgtatcactcaactagtcctacactgttcttgctactttatctatatgttttaaaatatgacagggctgggcacaatggctttttattgcatcaattgaggggtagctgttgggatgttcgtggttaaaatataatttctgggctctgactgggttgctttttagtctcttgtttttagggtttggcaaaggtaggtttacctaggttgatggaaaagtcagagatggggtggttgtggatttaatcggaaatagttcttgaaattgagtgtatgtgcgtgcatgagcatggctcacacctataatcccgcactttgggaggccaaggagagaggatctcttgaagctagaagttcaagtccagcctgggtaatatcaggaaaccctgtctctacaaaataaaaataaaaattagcctgggctgggcacagtggttcatgcctgtcatcccagcactttgggaggtcaaggtgggcagatggcttgaggccaggagtttgagaccagcctggccaacatggtgaaaccctgtctctactaaaaatacaaaaattagccaggtgtagtggcgcacaactgtagtcccagctactctggaggctgaggcaggagaattgctagaactgaagaggcaaaggttgcagtgagccgagatcatgccactgcactccaccctgagtgacagagcaagactctggctcaaaaataaataaataaatataaaaacaaataaataaattagccaagcacggtagcaagcatctgtggtaccagcttcttgggaggctaaggcaggagaatcacttgaccccaggaagaggaggttgcagtgagccatgattgtgccattgcactccagcctgtgcaacagaatgagatcctgtgtcaaaacaaaacaaaaaaatcccccccccgccaaaaaataaaatacaatggggatagtccagcactcctgtgggtcagaccatctcctctgatggtcttacgtgcttattttttccactgaattttagaacgatttactcgtttttagtttttactcagccaaagtataatgcttaccaggaaaaaaaaaaaggttaaattcaaatatctcaaaatggtagcaatatttttggccaaaacaaaaataaaaacaagccctagaaggaaatacattaagtatttatataatactaatagtaggaagggtcttactaaatttacaattattacagaaaatgtaaagaaaaaatggatagattttactaaatataaaatacagaatatttagtatatcaaaaaagcctacacaggccaggcatagtggctcacacttgtaatcccagcactttgggaggccaaggtgggcggatcaccagaggtcaggattacagaccggccaacatggcaaaatctcatctctactaaaaatacaaaaattagccgggagaggtggcacacgcctgtaatcccagctactcaggagactgaggcaggagaatcgcttgaatccaggaggcagaggttgcagtgagccaggattgcaccactgccctccagcctgggcaacagagtgagactctgtctcaaaaaagtcaacccaacacaaaggtgaatatacgtgacaattaaaaaggcaaatgtggccaggcatggtggctcacgtttgtaatcccagcactttgggaggccgaggcgggtggatcacctgaggtcgggagttcaagaccagcctgaccaacatggagaaaccccgtctctactaaaaatacaaaaattagccaggtgtggtggcgtgtgcctgtagtctcagctactcaggaggctgaggcaggagaatggcttgaacccaggaggcggtggttgcagtgagccaagattgtgccattgtgctctagtctgggcaacaagagtgaaattctgtctcaaaacaaaacaaaacaaaacaaacaaaacaaaaaaaaaaaaaacagacaaatgtgatcgtggatccctactcccatccctgccccatgcacccttagagacctccagtgtcttcccaccactccaaaggcagacaccaaccctctaaacaggacaccaaaggcacccccagcctggtccctgcccactcctccagccccatctcgcatcccaaacatcctctttccactgccacctgtgtcacactccctcgtttctgtctggaaagctcatcccagccccacaaagatcatgcctagcccttgagctgttcctagatgattcctgtacatcctaagctctccccttgaccctttcttcctcaggaggaaaccttcctgaccccctagccctgtgtcagctcaaacccaggacaagcaacaaaggaaaagatgatgaagaaaaaaggctaaactgcagctgccaagaagatcaaattaatgtgaatgtccagagatacacgtgagaggtaaggagggaccactctcactgttcaggttgctgcacaaagaaacttactaagggctggaagcagcgctgaattcattagctctgtgccgctgtgaaaatggccaggacccatacaagtcaaaatctaacaagatccactatggaggaaatccagatcgcagagcaattaggttgctggacagtgtccatttgacattggtgatgaaaacccagtgactaagactctagtcataaatacatgcatgagcacccacgcacccacacaggtacacatgcacacacatgtacgcatgcacacatacacgtagagaccaggctgagcctgcccctcttccactctcagaggaagcagaggcggcgatctggtacctaccgaggcctcagctgtgaggtggtggcatagggctcgatgaagctgtcctgttcaacactgctcacatcactctcagaccgggacctctggcgaggctgaggaatagcaaccgtccgcccagtcaatgttgtcgccagaatggctgctgccagagcagatctgcggacaaaaacatcccatggagacagtgagacatgaacattccaggtgaatgctgaacaaggtacataaactcatcaaggcttaccttctgctggacagtgtcgactgagcatttactctgcacccatcatctaccgcaggccatcagacaatctcatttgattctcacacaactgtatgactacatattattgtcatcccattttccatagaaattaaatgacttgtaaagattacctagccaataggaggtagaacagggcctctaatccaggcagacacaaaagcctacattcaagtagttttcttattagaatggaagatcagaatggaaaaagaaaatgagatatagaaagactaaaagatttaaaaggggactttaaaaatacttgtgaattactcaggaatattttacaggaaagttagagtaaacagatttaccctcctgcctaaaaaagtaaaacaaggccaggcgcggtggctcatgcttataatcccagcactttgggaggccgaggtgggtggatcacgaggtcaggagatcgagaccagcctggctaacacggtgaaacctcatctctactaaaaatacaaaaaaattagccaggtgtggtggcgcgcacctgtaatcccagctactcaggagactgaggcaggagaatcggttgaacccgggaggtggaggttactatgagcctacattgcactactgcactccaacctgggcaacagagcaagtctccatctcaaaaaaaaaaatagtaaaacaaaacaaaagaccaccgtcccagcttgctgcctaggaaaatttccaggtcacagcacagggaggaggaatgggtggagccaggcagactccctgagttgcagagatggagctgagagaatgtgtaggatagagtgccggaaaggagagaactgcacagagagaacgaggagatctgcagaaggtcccctagtttcagcgggatacagtgcagcacacaagtgtgaggaaattaccagacagtggaggaagaaccattcaccaggatcagaggagcagtgccaggtgcttacatacagcccaagacggcagctgctcccaccaggaagactggagaaacctatcattcacaagatgccgggtgcagcactcagaaaggtctggcctgggtactggggaataattagccctggctgggcactgctccacaccccacctaacaaatcatataagaaagacccggccaggcacagtggctcacatctgtaatcccagcactttgggaggctgaggagggcggatcatgaggtcaagagatggagaccatcctggccaacatggtgaaaccctgtctctaccaaaaatacaaaaaaaaaaaaaaattaggtgggcgtggtggcgggtatctgtagtcccagctacttgggaggctgaggcaggagaatggcgtgaacctgggaggtggagcttgcagtgagccgagatcgcgccactgccctccagcctgggcgacagagcgagactccatctcaaaaaaaaaaaaaaaaaaaagagcatcaatcagatgtgggataaaaaccaccatttttcatattttggttttggggcttttttttgagacgatctcactctgttgcccaggctggagtacagtggcgcaatcacagctcagtatagcctcaacctcctgggctcaagtgatcctcccacctcagtatcttgaatagctgggactataggcacacgccaccacacctggctaatttttatattttttgtagagatggggtctcaatatgttctccaggctggtctggaactcctgggctcaagtaatcctcctgcctcagtctcccaaaatgttgggattacagccatgagccaccacgcccagctgctgttttgttttaaattactacattttggtgcaattgtcacacagcaataaataactaatagccttaccatcaaatggtgctggaaaaatcaaatttccatatgcaaaaaaaaaaaaaaatcatggatctataccttacacactgatatggtttggctctgtgccattacccaaatctcctctcaaattgtaatccccatgtgtcgaaggaggaaagtgattggattatgggggtggtttcccccatcctgttcttgtgatagtgagctctcacaagagcagatggttttacaaatggtagtttcttctgagctctcacatgctcgctctctctcatctgccgccatgtaagacatgcctgcttccccttctgccatgattgttggtttcctgaggattccccagccatgcagaactgtgagtcaattaaatctcctttgcttataaattaccacatctgaggtagtatctttacagcagtgtgagaacggactaatacacgcaccatctacaaacactaactctaaatggattacagacctaactgtaaagccgaaaaccataacacttctagaagaaaatataagagaaaacctttgtgaccttaggttaggtaaatatttcttcaatatgagatactgaaagcatgatccataaaagaaaaaattgtaagctggacttcataaaaattaataacttctgctctttgaaaggcactgtttaagagaatgaaaagacaagccatagatagagagaaaagacttgcaaatcacatatttgataaaagacttgtattgatactatataatgaaccctcaggatgcaataatggaaaacaagccagggctgtgatgtctccaggaaacccacagtcttcacccaggtctctgcttacgtctcctggatgaaaaatgtcattgcctccaactgaacatgatcctgagtccaacggccttcccaagatggttcttagatctgcaacaggacttgtgaccaacaaggaatgcccaatttttataaatgggcaaaagatgtgaacagatgctttactaaaaaagatataaagatgacaaataagcacatgaaaaaaatgctcaataccattagccattagagaaatgcaaaataagaccaggcgcggtagctcacgcctgtaatcccagcactttgggaggccgaggcgggtggatcacttaaggtcaggagtttgagatcagcctggccaacatggcaaaaccacatctctactaaaaatacaaaaattagccgggtgtggtggtgcatgcctgtaatcccagctacttaggaggctgaagcatgagaatcgcttgaatccaggaggcggaggttgaagtgagctgaaatcgttccactgcactccagcctgggtgacagaatgagactctgatcaaaaataacagactccatctcaaaaacaaaaaaacaaaaataaccacaatgaaatactagtacacgctcatgaaatgtccaaaattttaaaaactgaccaagacaaccccttgtgctcttttattctaaactgggcctatgagaatggattccacaaaggagggcaataagaagggttgttctgtcgtcaacaaggttgtgaccagaaagcacactatcagcactcatgagcacacctatggagtgtgctttaagacactgcccctggcatacacaaagagatctggaaattttccatgaaagagctaggaactcgagatgtgtgcattgatgccgggctcaacaaagctgtctcagacaaaggagtaaggaatatccctcaccctatctgtgtaccactgtccagaaagcgtaatgaagatgaagattgatcaaacaagctctgtacattggttagctatgcaactgtcaccactttcaaaaacctacagtcaatgtggatgaaaactaaccactgactgtccaagttataaaagaccacacacacacacacacacacacacacgcactcacacgcatgcacatgaacacacacacacacacacacacacacacacacacacacactctgaccaaaccaagtgttggtgagaatatgaagcaactggactcatatactgttggtgggaacataaatgggacaatgaccttggaaaatagtttgacagttccttaataaattaaatacctgcctagtataaggcccagttatagatatttacccgagaaatgaaagtatgtatccaaacatttgtgtatacatttttttttttttgagatataagtctcgctttgttgcccaggctagagtacagtggtgcgatctgggctcactgcaacctctgcctccaggttcaggcgattctcgtgcctcagcctccccagtagctgggactacaggagtgcaccaccacacccagctaatttttgtatttttagtggagataggttttcaccgtgttgaccaggctggtctcaaactactaagctcaggtgatctgcctgccttagcctcccaaattgctgggattataggcatgagccaccacactcagccagtgtgtaaatgtttacagcagcctttttctagtaaccaaaaattagaaacaaactaaatatccatcaacaggagaatggataaacaaactgtggcatattcatataatgaaatactactcagtaaggaaaaggatgaattattgactttcggaacacgcgttaatcagaataatcatgctgagtgaaggaaggcagtgtattttatgtaactccacttatataaaattctagaaaatacaagctaatccatagtgtgagaaaggagatgagaggttgcctggggatgaacaggagcatgaaaggtggcagagaggggcagggggaaggaattacaaaggagcatgaggacccttgtcagaatgatagatatatttattatctttttttctttttcaggagctaccctattaattatctttttaaaataaacttttttagaggcagggcctcactcacaacagcctcactgttgctcaggctgcagtgcagtgacatgatcatagctcaccgcagccttttcctcttgggctcaagtgatcttccagccttagcctcccgagtatctgggattgcagacatgcaccatcatgctcagataatttattttcttttgatttttgctatagataaggatttgctatgttgcccaggctgatcttaaactcctgggcacaagcaattctcctgcctcagcctcccaggatcagtttaccctaggagttcaagaccaacttgggcaacatagtgagacctccatctctgcagaaaatttaaaaaattagccaggcatggtggtgtgtacctgtagtcccagctactcaggacgctgagacaggaggatcgcttgatgctagggggttgaggctgcagtgagtcacgttcgcaccaatgcactccagcctgggcaacagaatgagaccatatctcgaaaaaactttttgttttggccaggcacagtggctcacgtctgtaatcccaggcactttgggaggcagaggcaggtggattgcttgagcccaggatttcagcctgggaaacatggcaaaaccctatctctataaaaaatagaaaaattagttgggcatggtggtacatgcctgtagtcccagctacccggcgggctgagatgggagaactgattgagcctgggaggtggaggctgcagtgagccatgattgcaccactgcactccagcctgggcaacagagcaagatcttgccttgaaaaaaaaattaataattaaaaaaaaaaaagaaaatgggctgggtgcggaggttgatgcctgtaatcccagcactttcagaggccaaggcaggcggattaagaaagaggtcaggagtttgagaccagtctggccaacatggtgaagccccatctctactaaaaatacaaaaattagctaggcgtggtggcatgtgcctgtaatcccagctactccggaggctgaggcaggagaattgcttgaacctgggaggtggaggctgcagtgagccaagattgcgccactgcactccagcctgggcaacagaacaagactccgtttcgaaggaaaaaaaaaagaaagaaaattatgtgtataattcaaaattccctgttaacctgaatacttgggctttaatgctttacatttttttttaaatactcattgcattcaatcatgaaatgtgagaagttcatgcacctgaaaaggagagacctcaagtcagtccattatcctcagagacaccatattaattgcatcattatggaatcgtggtaaacattttgaaggacatgattctaaccaccctacttatacttttctgggcagtttgagcagttccaggatccagtacttggaggctgagcacaggggtgacctcagtgcctgctcatctgatactcaccttggtctctctggagatgggttggggctgcggggaggaggtgtgcgtggcacagctgccttcggagcaacgctggctgcaggtaaaaggccatggatgatgtgtttctgcacaaatgaaatccaacagaagtcactgggttgggtcactggatcacctgagtcttgtcaccactctccctgggcctgcaaggggacacctgcactggccacccatggatccaaacccatcagaagcccactcctcccctgccatccccagtccccatcaggccagacaagtgcacacagccaaggagcatcatgatagctgctcattgtgtggccctcttgtccttccctcctcagagcttccctggctgtccccaagagtcaccctctagctcttccatgtgtcccacagcactccccccagtgatgtctcatgtggctccccctgcagagcagggcgacttcctgagaagcaagtgatatccttattgtttttcgctttgttttgtttttgagatggggtcttgctctgttgcccagagtggagtgcagtggtacgatcatagctcaccgcagcctcaaactcccgcttcagccacacgagtagacgggactacagatgttcaccaccatgcctaggtaatttttgtatttttttgtagagacaggatctcactacattgcccagactggtctcgaacttctagcttcaagtgatcctcccacctcagcttcccaaagtgttgggattataggtgcgagtgctgcacctggcccactctcttatctttatcaatcctggaactctagcattgagcacattgcctcacacctcataggggcttaatataagcttttaggtggcttatctccaagacgagagtaatgaaaactagctcctatacacaatgaaagtcagagagctccgctttaggtaactgtaactgggagtctctgagacgtttctgggtctagtccaatcattttcttggcacgagccattcattcacacctactagaggcaaaacaccatgacagcaatgaagaaaccttgtcttcatccccaaagtggtgagaagggaggaaaaacacccaaataattattacagaacatagaattatggaatgagccgggagaaaggctctcactaaaaatgaaaaaaaaaaaaaagagcatcaatgagatgtgggataaaaacactattgttttctatttgaagccagtaattagcacaaagtgctggggtgggcagggagggaagattcctccaggtctggggccagcctgggaatttcaaatgctttccttcgagaaaatcacacaggcgtttagactgggctttcagagatgcccactggtcccacatttggaaatgtgacggaacagcattctaggaagagggaacggcatgaacaaaggaatggagcaagacattggttgcagtgctcggaaatcataagcacgattctccgttttgctagactagaggcatcttcgagggtggggcttgggggcatggtggggacaattcccatgggaagggcttccagagcagatggaggaaatcccaaggcctagtgaggagcacccactgacagtggccccaggaatgttaggtagtggtcagcacgagacacaaggctgggaagggtggcacagagtgggggcatctttcaggagtgagggatgggcacaccttccagtcatctcctacagcccccaccaccgacttgcacagccacccacaggagcagaagctccaagcagtctctacccaatacccccactctgtttacctctgtgtggcacctgccaccctgtatttgtcaagtgattccacagtttccatgtttccaccctgcccccctccaccacctgctacacgacaagaaatggtttttgtttgtttgcttgttttggagacagtcttgtctgtcacccaggctggagtgcggtggcacgatcttggctcactgcaacctccacctcctgggttcaagctattctcatgcctcagcctcccaagtagctaggaccacagtcatgtgccaacatgcctagctaatttttgtattttggtagagatggggttttaccatgttggccagggtggtctcaaactcctgacctcaggcaatccgcctgccttggcctcccaaaatactgggattacatgtgtgaaccactgcacctggccagaaaaggttttcttaacctttgaatcccaagggctggcgtccagcaggtcctccaaaaaggctgcataagattttttttttttaaagagtgaatcccccctcataccatcacaatcattcctaactatggtcccctcatcaatcctgtctctactgggcataaaaaccctcatgggcagcaccactctctcaacggcaggcaaatgtccagcatggcttatcaggctgatataggttggttcctaccaagtgttatgggatttttggggtgtcgatttttctggccggaacctctgtggccacagtgcctttgcctgagttcttgtcctgcatccaggaagaatgaggtacacagacaagtgaagggtgaagaggagttttatttagtgttagaagagctcagaggagtgggtagctcctctctggagacagattgtcccatgagctcaaccattcagctctcaacagagaggaggccctggagagagtggctcctctccgcaggcaagtcattccaatgtctctgcaggtctctgaagctcgcagcagagtgtagctcctctctgctggcaggtggtctctgtagctttcagcggagaaggtactcctctctgtagctggtcaccccaccgtctccagctatcagcagagagggtactgctctctgcagctggtcatcctgtcccctcgtctctaccatcttcatcctctggctattctctgcgctgctctggctgagcccagggtttttatggacctcagcggggaagaagtgtgtgctgattgggccattggcaggcccagaaaaggctccacgagtttccactctggtcagagggactggcagcccagcccccagaattcaggccctccctggcctgagggtggggccttactggggaccccacccccttcctcctgctgccattcatggctgcaggtcttggctccgactcccctccaagatcagagcagttgctggagtggagagaggccaggcagtggaagcagacacccctgagcctgcagggatggagggtgaagggggctgtccttcctgggatggccgatggtgcaggctacagagatgccctcgtcctgtgcctgggggggcagccacagctgcacctgggagctcccaccccgccaacttggaagaggcagggctcccacttgtccctggctcctgcctgcgcggctgcagctgcatctggaagggcaaattctgcctgttcccggctcccccaggagcagagaggctcggatccacagctgcagtttgggtggctgtagccctgcccaagagggtggggctcctgcctgctccatagagcagaaggcctgggtctgcagcagcggtttgcggctccagtcccaactcatgagggacggggcttccaccggctccatgaagtgtgcagccctagccacacagcgtgatggcagcagccactgccatcacaaggacccaaattcatttcttgcttcccctcctcttcctgcgcagagtccctgtgcttcagcactcagcgtgggcttccatttcccaaacagcaaataattcattcttttttaggccttggtatttgctgtcttctgcacccagaattctttccttactccctgccaggcccaggccaactctccaggctgacgtcactgcccttctggtacacacatcaacagcagttcttgttttaccattgtgtacagaattatttatgggcttgtctatcctacagaccgtgtggccataagctgtcagttgtgggtatcagcacacagcagggactcattaatgtttggggctttaaataaaaactcaagccagatgcagtggctcacacctgtaatcccaacactctggaggccaaggtgagaggattgcttgagccaaggtttaagaccagcctgggcagcatacccagaccccatctctaccaaaaaaaaaaaattatgtttttttgaggcagagtctagctttgtcgcccaggctggagtgcagtggcacaatcttggctcactgcaacctctgcctctcgggtttaagcgattatcccacctcaacctcccgtgtagctgggattacaggtgcccaccaccacgcccgctaatttttgtatttttagtagagatgggttttcaccatgttggccaggctaatcttgaactcctgacctcaaatgatccgcctgcctcagcctcccaaagtgctggattacaggtgagagccacctcacgtggcctctacaaaataatttttaaaattagccaggcattgagacttggcagagtgtgaggcaaaaaataaaataaataaaaaatacctaggtgtggtggtgcacacctgtagtcccagctactcaggagcctgaggcaggaggatcacttgaacccaagaggttgaagccacagtgagctatgatcatgccactgtactccagcctgggcatcaggacaagaccctgtctctaaaactaaattaaataataaataaatataagaatccccttggctgctacgtggagaatggacctaggggaagggcgagagtggaagcagagaaaccagtgaggatctgccgcagcagtccagacagatgctggaggccggggtgtgggtggagatgggaacagctggcagatgtatgtagtgggtatatcggatgggacttgctgatggggtgtacatggtgggtggaggagggaaaaatgaagaatggctatatccagcagtgcagcaggtgtacgtcgtccaggagttaactccgggcacggggacgaatgctacaggggaggcagggtgctcctgtccaactgtggccgaccctggggcagaagattgttaacgccgggcacagtggctcacgcctgtgataccaacactttaggaggctaaggagctcaagaccaccataggaacatagcaagatccctgtttccacaaaaatattgaacaattagccgggagtagtggcgcgcgcctgtagtctcagctcctcgggaggctggggtgggaagatcgcttgagcccaggagttcgaggatgcagtgagctatgatcgcaccactgcactctagcctgggcgacagagcgagaccctgtttcttaaaaaaaaaaaaaaaagtttagaacacgaaaaatcaaggcttcctcaactgaaaaccactttctcttgtgccgcccccttgactggatctcaggccaaaccccaacccgccccaacactttacccctaattcccggccccacagagccccacgcgcggcgggcgagcatctacttacgaaatgactcctgcggcctctccgaaatcccaggagcatccttgcagcgcgaggagaatggaccggggcctggactcatcagcagatctatccacagccagggaccactccctaaagcccgccgcaggcccagccctcacgctttctcttcgcaatggactttgcagcaaccacgtcggccattggctcagctcggccctcgaccaatcagagctaaggttacttccacaccggtcgttcttggcaaccagtgggtaccgttcaaatccccgccagggcggaaacgtccgcccttatccgttctcttattggtcaggttagacgtccatttctgacgccacagcctatccggcgctgcgggaggcggagggcgggctggatgaaggactgggcgagcaccgagggcgtgaacccggaaggtggcgcggccaccagtaacatgatctctagactgggacggtggggttcctgccggctgtattcgggccttggactggactgagaagctacggtgcggatccagctggggtatcaggggctaggcacgtgatgaaaatgaaggacgcggacaccaggacaggaatctcctggttcttagagaatttatttcgccacaaataattggcaaacgggatctcgctgtattgctcaggctggtctcgaactcctgggcacaagcgatcctcacgcctcagccttgcccaatgttgggattacagacgtgagctaccatgcccagcccaggattcttttaaaacttaaatctgatcgtgcctctggccttattggaatccaatgccattaccacctccaccaccacacatcccgtctccagccaccctggccttcattcaggcctttgtgttttctttttcttttcttttttttttttttttttgagacgagtcttgctctgtcgcccaggctggagtgcagtggcgcgatctcggctcactgcaacctccgccttccggattcaagcaattctctgcctcagcctcccaagtggctgggattacaggtgcccaccaccaagcccggctaatttttttgtatttttagtagagacgcggtttcactatcttggccaggctggtcttgaactcctgaccttgtgatccacccgcctcgctcggcctcccaaagtgctgggattacaggtgtgagccaccgcgcccagcctgtgttttcttattagtaattataaagggaatcttatttgacagttctttgacaaataattcagtttgcagaggggatcctgccccagaggccctggcttggagtggaatgcagggccgtgtgcaggagagcctgctcaagtgccgcctggcttttccctccttaggtggagaccatccatggaaaagaacccccctgatgatacgggccccgtgcacgtgcctttggggcatattgtggccaatgagaaatggcgcgggtcacagctggcgcaggagatgcaaggtcggtggcctgccctctgccagccctttcctcccctgacatattaaaaaaaaaaaatctgcctattattgccatcttttcatccaaagcttatggaactcattttcttctctgtattttaagggaaaattaagctcattttcgaggatggcttgacaccagacttttatctgtcgaacagatgctgcattctttatgtcaccgaagctgatttggtggcaggaaatggctacagaaagaggcttgttcgggttagaaatgtaagtattaggctgggtgctgtggctcacgccagtaatcccagcactttgggaggccaaggcgggtggatcacctgaggtcagtagttggagaccagcctggccaacatggtgaaaccctgtctctgctaaaaatacaaaaattagctgagtatggtggcgcacgcctgtaatcccagctactagggaggctgagacgggagaattgcttgagcctgggaggcagaggctgtagtgagccgagatcacgccactgcactccagcctgggcgacagagtgagattccaactcaaaaaacaaaaaacaaaaacaaaaaagaaatgtaagcattggattaaagaaactcgaacattgatttgtctcaccccacccttccctccatcccttggtatcatttatttaaaatcattggccaggtcaggcacgaagtgatagcattcttaacctgaaaagcaatttggttgcaaaatgacttactgtcttttttcctttcaagtccaataatcttaaaggaattgtagtcgttgaaaaaacccggatgagtgaacaatacttcccagccctacagaagtttactgtgctggaccttggaatggtgctgcttccagtggccagccagatggaagcatcctgcctcgtcatccagttggtgagtaccgattcctacaccttcgtggtagtcctgtcctcatggacactcagctgctctccagaagcaaccatcaatccaatctatgtcattctctgacttggtttataaaatctcttcgaggaatttaaatgcggaagctgcctctgcagccagctcagcttgtcacacactccaggcaagtgtatcacaaagtatacaagttggagacctgattttagattctcagggtgtgatggctccatcagtcattatcctgccctttcgctggtgaaaacgtcaacctagaggccaggcgtgatggctcatgcttgtaatcccagcactttgggaggcggaggcgggaggatcacttgaggccagcagttcgagaccagcctggccaacatggcaaaaccctgtctctactaaaaatacaaaaattagctgggcgtggtggtgggtgcatgtaatcccagctactccggaggctgaggcaggagaatcacctgaactgaggaggtggaggttgcagtgagtggagatgctccattgcactccagcctgagcaacaggagcgaaactttgtctcaaaaaaagaaagaaagaaagaaaatgttaactagaagctgctttgtctcatcccgtatttttgttaagcatcagcaccttgtgcaagttttttttttttcccttttttttgaggcggagtctcgctctgtcctacaggccagagtgcagtggtacaatcttggctcactgccatctccacctcccgggttcaagccattcttctgcctcagcctcccgagtagctgggactacaggcacgcaccaccacacccggctaatttttgtatttttagtagacagggtttcaccatattggccaggctggtctcaaactcctgacctcatgatccgcccaccttggcctcccaaagtgctgggattacaggtgtgagccaccatgcctgggcagtttttttttttttttagatagggtcttgctctgtcattccagctggagtgcagtggtgcaatcttggcttactgcaacctttgcctcctgggttcaagcgattctcctgcctcagcctccctagtacctgggattacaggcacccaccaccatgcccggctaatttttgtatttttagtagagataagagtttcaccatgttggccaggctagtctcaaactcctgacctcaggtgatctgcctgcctcagcctcccaaagttctgggccaccgcaccaaccaacacttttttttttttttttgagatggagtttcgctcttgttgctcaggttggagtgcaatgatgcagtctcggctcactgcaacctcctcctcctgagttcaagtgattctcctgcctcagcctcccgagtagctggaattacaggtgcccgccaccacgcccagctaatttgtattcttagtaaagacggggtttctccatgttggtcaggctggtctcgaactcccgacctcaggtgttgtgcccgcctcagcctcccaaagtgctgggattacagtcgtgagccatcgcgcccggccgccaacacttatttttaaaatcagtttagtagcttacgcctctgatcccagcatggggaacatcaattgtgtgtgtgtgttgtttgtttttttcacttttgttttctttgttatgtgtgtgttgtttttaaatcaccccctctgatgtggagctagagttgagagccacattgaagatgcaagcagccatgaatggttcacagatccctctctactatatcccttgcgtcaccgttcctaactttccttgatataacactgttgtctgccttagtataaccaccactaactagaccaggtttctcctttgaggcaggcttcctgcagctcctgcgtgaagtaggcctagtttaggtgtagccatcatttaatcctgcacaactgaaatgtttcttaatggaccaacagaaagtgtttgaattcatctgtgtgtttttctaaacattctgaaaacgcacatttttgtaaattaatgtcttaactcctttgtgtggttcacctttcaataattttactgatgtctgagaaattatattcatgatacatgaaaacatttgttcccttaagtcaagctgagccaaatggaaaaacgcaatttctacaaaacatattttaagaaaacggccagtcctccagagggcgctcacgtgctgttgctttcattgtggttcaggttcaagagcaaaccaaagagcccagtaagaaccctcttctcgggaagaaacgggccctgctgctgtctgagccttcgctccttcgaaccgtgcagcagatcccaggagttggaaaagttaaagctccccttctcctccagaagtttccaagcatccagcaactgagtaatgcttccattggggaactggagcaggtggtcggacaagcagtggcacagcagatccatgccttcttcacgcagcccaggtgagggctggcctcagggccacggcatcttctcctgagaccacaaacaccaggatcttgttttcagctttaaaaaccaagagaatgggccgggtgcactggctcacgcctctaatctcagcactttgggaggccgaagacagcggatcatctgaggtcaggagttcaagaccagcctggccaacatggagaaacccctaaaaataggaacaattagccaggcatggtgacaggtgcctgtaatcccagctacttgggaggccgaggcatgagaatcacttgaacccgggaggcggaggttgcagtgagctgagatcgtgccactgcactccagcctgggcaccagagcgagactccgtctcaaagaaaacaacaaaaaaaaaaaaaaaagaaaaaggattttctccagcagcaaccagtgaaagatgaggcgaggcttgaatggagcccgtgggtcgtcctgccttagcgtctgagttcagcttgtgaagttagtgggccgcagagggcactgccttcattctgctaagacgaaaagggctggtgggatcttcgcaagagagtcagggactcacactcagcaaaaagcattagggccgattttaatgtgcgaccttgacctgcatctgtcatggaaagtgccttctaaaaagcttcagtggtggatgtgaccatctgaaggaaacaaatgtacaaggaagcactgtgtatcctaagccctgggttcccagagtttcacctgctgttcatcaggtctggccttcatatacccgtactgcgagggctgtttccaatgtaaataaataactgcgcaacagttccttcctcctttcctttgttcctccctccccccggcctttttttttggcagatgtacagtttgtttataatcactgcatatgtcttctgcacacagaaagtatgaagtctgaagttcccacttaaagttgaaaactcaacggccgggcatagtggctcacacctgtaatcccagcactttgggaggccaaggggggtgaatcacaaggtcaggagatccagaccatcctggccgacatggtgaagccctgtctctactaaaaatacaaaaattagctgggtgtggtggcacacacctgtaatcccaactactcaggagactgaggcacgagaatcgcttgaacccaggaggtggaggttgcaatgggccgagattgcaccactgcactccagcctggatgacagagtgagactccatctcaaaaaaaaaaaaaaaaaatttaaagttgaaaactcaacatgcatgaggcagaacaggctgtgtttgtatatgaaaggcccaacaatggaaggatacaagaaaatgatggcagcagctgcatctagtgagggaagcaggggctggggatcaaaaggtacaaattgcccattcaaaaaatagacacaggccaggcacagtggctcacacctgtagtcccagcactttgggaggctgaggtgggaggattgcttgagtccaggatttcgagatcagcctgggcaacatggcaagaccccatctctacaaaaaaatcaaaaaaattagccaggcatggtggctcatgcctgtagtcccagctactcaggagggtgaggtgggaggattgcttgagcccggaaggttgaggctgccatgagccacaattgcgccactgtcctcctgcctgggtgacaaagcgagaccctgtcttgaaaaaaagacaaaaacaaaaaataagcacaaagataccatctgtcttagaaaatactaagataacttgacagctttttaagttctgctttgtgaaatgttagtaactaaaaaaatcagaacattagaaactgtgtgcattggggagaaacaatttgaaagaggagggaatgaaaatgaaataaaagtaaaaagaaatattaactcgggtaaatgaatatgtttatttaaatatgtatacaagcatggccctaggagcagcagatacactttcccaaaggtggttgcttcctttaagatattgcacaatagaaaataaactcttgtcaatccttaaaattagtcttcaatgctatgtattttagctatgtaacttgtactgtgtcaacagtgaaccttattagattcacggtgtcatcgaacttatagcaagataaaaatcaatcagtaggaatgtcattttaaaaagtaaaatagtgggacggttgtggtggctcatgcctgtaatcccagcactttgggaggctgaggtgggtggatcatttgaggtcaggatttcgaaacccgcctggccaacatggtgaaacctcacctcaactaaaaatacaaaaatcagccaggcatgctggagggcaccttgtagtcccagctatttgggaggctgaggtaggagaatcgcttgatcccagggggcggaggttgcactgagctgagatcacaccactgcactccagcctgggcaacacagcaagacgctatctcaaacaaaaaaaggaagtcaaatagagctttaaacctgaatcatttacatctttactttataaaatgtaaaactacttttttacccaagacttaaaatatagaattatgtaacttctactttaaacaaaatgaaaaatgttttgagtatcaaacagtatattatctaccttgtagacagcatcttcatctaacactgccactgtgttagtaattcttaaatgacatcaaactagaagaaaagctgctcctacattgtttttatttaataagacaaatttggcactagactttttctagaaatagcattcatagtctatcgatataatagtaacatcttgttttaggttaatgaattcctattaggaagcagcactttgggacagtttttagtgacactaatttaattctatcattacagtcctctgacctgccttaattccaggatcatctgaattctaggttaaggaatgattattagccaaacctggaaacaactacaaattgtactgatataggtaaccccaatttaatagtgactaaaagtcataattgtcaccattaaaaatagccatatttcatatcttcaacactattctatttacaatactttatataataaataacttacagcagtatagtaacacacctcaaaaaagttcttttttcactaattcctagaggtttcttggttactttccttcataaaaacacatcaaatgtgagtttacactatgagaaaaacaggatttgagaacagatagatagatattttccattatggcacaaacgtttaaggccgagtcagcaccggaaatgttcagggcctgaacatgtttgtttcctcacattagtaccaagaactgtctgagttgagaaggctgaaaggggagggcagcttcttcttgacctgaggccgtgcagccccgaccgatgggaggcacaaggtgctggctgacttctgtctgttcttgttggtgccccaactcaggaaggaaagcttcttggagattttcttggttttatcagttttgtcgtcatcatcaatggctaagcagatcatggagtacgttttctgcattcccacggagtatgtggcactcttattatgctgcacatagaaaagtaagaaaaagggcgtcaggcatcatcaagatagatgataaaaactacgaagtttggccaggcgcggtggctcacacctgtaatcccaacagtttgggaggccgaggaaggcggatcacttgaggtcaggagttcaagaccagcctggccaacatggtgaaaccccatctctactaaaatacaaaaattaaccaggtgtggtggtggatgtctgtagtcccagctgcttggagcctgggcacaagaatcacttgaacccaggaggtggaggttgcagtgagctgagatcacaccactgcactccaacctgggtgacagagcaggattctgtctccaaaaaataaattgaacagacataattcggaaactcaggtgaccaatgcttatatagaattaggttcttaaaacaaggacaaactttttttcttttttgagacagggtcttgctatgttgcccaggctggtcttaaactcctgggctcaagcgatcttcctgccttggcctcctgagtagctggggctctaggtgtgcaccaccaggtccaacaaggataattttttgtttgttttttgtttttgttttttaagacagagtctcactctgtcgcccaggctggagtgtagtggtacgatctcggctcactgtaagctccgcctcccgggttcacgccattctcctgcctcagcctctctgagtagctgggactacagacacccgccaccacacctggctaattttttgtatttttagtagagacggggtttcaccccttctcgatctcctgacctcgtgatccgcccgtcttggcctcccaaagtgctggaattataagcgtgagccaccacgcccggcccaacaaggataatttttaaggaatgtactcaatagtaacaatttaagcttaggagccacaactcatattttaaggttcttcttctatttgagaaagtaataatactcatggtcacgaatatgaaagtacagggtggggcgcggtggctcacaactacagtcccagctacctgggaggcttagaggggaagattgcttgagcccaggaggttgaggctatagtgagctgtgattgtgccactgcactccagcctgggcgacagagtgagacctctgtctcaaaataaaaaaaaagggggggggcggggggaagggaagaggggaaaggaagggaagaggggaaggaaagggaagaggagaagggaatggaagagggcaagggaagggaaaaaaaaaaaaagagtatgcagtgagcaataggtctccctgtcacctgggcttctaaggccctccatgttatacttctagagatgatgtacaagtatttctatatgtacctaagtatattaccattcattttcttaaaaggaatatactacactattctacacctgattttctttttttcttttttttctttttcctttttttttttttttttaagatggagtctcgctctgtcgcccaggctggagtgccatttttatcattttcaagtgtagagttcggtggcattaattacattcacatcattatgctccactgccaccatccatctctaaaactttttcatcttcctcagctgaaactttgtaccattaaacactctctactattaactttccaagaatcatgtaggattcaaactggaaatctaaggaagcttgctttctgaagacttccacatgggctatcaccggcttctaaggtttgcctaacattgagattgtttagttcgccacatgtttattgatggtctactatgttctggcactaaaattaggcatacaatatatcgctgcaatagttgaggacattgttcctaatataaaccctaagaggggccgggcacagtgtcttacacctgtaatcccaacattttgggaggctgagttgggcagatcacttgaggccaggagttcaagaccatcgtggccaacatggtgaaaccccatctctactaaaaatacaaaaatcagccaggtgtggtggtgcacacctgtaatcccagctactcaggagctgaggcagaagaatcacttgaacccaggaggcggaggttgcagtgagcccagatcacgccactgcactccagcctgggcgatggagtgagacgctattgcaaaaaataaataaataataaataaataaataaaataaaccctcagaggaatctgagttatgcagcaataaagtagggggtacttcgagcccctaaggatggagatgcctcttccttttctggaaaactgaccgctaactccaccatgttttacggagcacacacaatgtcatttaaaacaataataaaacgaataatcctggagacagatgtgaggcctgaaagcatttcccaaccctcagctgctcaaagtccattgtgtatcaaaaccactgccttataaataccctcagttctcttccatctgcccccactcgctcatctccaccctctgcctcccctagggcctgtatctgaaaggttgtgcgttgctggaggacactcaccaaggcttcccttggaattctaacctgaccccaaacctctaataggcacccatttcctggcacttctgtgtgtccctagtaatttcatttccttttctcctgtatacttgtttcttatcttcgctctcctcctgaagccactcacgcaccctcctgacatccctgccgtatacttcatggcatccgtcccccaagaccaagcccttctgtgtgcctggatcccattccctctctcctccaggcacccttgcctcccagatctctacacacacacacacacacacacacacacacacacacacactcctgcaatgcgtaccatcacattctttgaaaagcttttcttggcccagatctctacacacacacaaacacacacacacacacacacacacactcctgcaatgcgtaccatcacattctttgaaaagcctttcttggcggggcgtggtggctcacgcctgtaatcccagcactttgggaggccaaggcgggcagatcacaaggtcaggagattgagaccatcggggctaacatggtgaaaccctgtctctactaaaaatacaaaaaattagccgggcgtggtggcgggcacctgtagtcccagttacttgggaggctgaggcaggagaatggcatgaaccaggaggtggagcttgcagtgagctgagatagcgccactcactgcattccagcctgggtgacagaacgagactgtctcaaaaaaaaaaaagtaaagcctttcttgaccctgttcccctccaggtccaccccagtatcatacccacacacactctctcactcctgcaatgtgtaccactactttcttttaaaagcctttttttttttttttttttgagacggagtcttactgtcaccagactggagtgcagtggcccaatcttggctcactgcaacctccacctccaggttcaagtgattctcctgcctcagcctcccaagtagctgggattacaggcacatgccaccacacccagataatttttgtatttttagtagagacagggtttcaccatgttggccaggttggtcttgaacttctggcctcaagtgatccacctgcctcagcctcccaaagtgctgggattacaggcgtgagccactgtgcccagctccatttactgtttctttccccaccacccattcctcactcaaatccacctggggtacccctctagaactcttagggctttacagagcacagtttaaaaccactgtgtaggcctaactcttccatcctctggatgagaaaaccgaggcccaaggagggtatgaacgtgctgaaggttacacagcttgtgaacggcagtcagggcctaattccagagcttgattccaagcttagatttgttcaactagggatccccactgtagtcaagagggtagccaagggcagcaggtcatcagttcagccagagtgctaggctaaatgttctctttatttgattttgtttgaaaggctcagtcgctaaaaacagtgcttgactgtcattatctaaaatccttatcataaaaattaatagacaaaaataatttttaaaaaattatttttaaaaagccaggggctgggcatggtggctcactcctgtaatcccagcacttttgggaggccaaggcgggccaatcaccggaggccaggagttcaagatcagcctggccaatatggtgaaaccccatctctactaaaaatacaaaaattagccagacatcgtggtgggtgcatgtaatcccagctactcgggaggctgaggcaggagaatcgcttgaacccgggaggtgaggttgcagtgagccaagattgcaccactgcactccagcctggatgacaagagcaagactctgtctccaaaaaaaaagagccaggtacagtggctcacgcctgtaatcccaactattcgggaggctgattcaagagggtctcttgaggctagaaattcaagatcagcttggataacttagttagacctcgtcaccacaaaattaattaataaaagacaaaaggaaattacttttggcctggtgcagtggctcattcctgtaatcctaacactttgggaggcggaggcaggcagattgcttaagcccaggagtttgggaccagcctgggcaacaaaatgagactgtcactacaaaaaaattaaaaattagctgggtatagtggtgcacgcctatagtcccagctacttggtaggatttttttttttgagatggagtctccctctcttgcacaggctggagtgcagtggcacaatctcggctcactgcaacctctgcctcctgggttcaagcaattctcctgccttggcctcccaagtagctgggattacaggcgcccgccaccaccacgcccagggttttgccatgttgaccaggctggtctccaactcctgacctcaggtgatgagaagggaggatcttttgagtcctagaactcgaagctgtagtcagctatgattgcactattgcactccagcctgggcaactgagttagaccctgtctcaaaacaaacaaaacaaaaaacaacaacaaaagaaattatttggccgggcatgctggcttatgcctgtaatcccggcactttgggaggcaaggtaggcggattgcttgagcttagaagttagagaacagctagggcaacacggtgaagccccgtctctacaaaaaatacgaaaaattagctgggtatggtgttccatgcctgtagtcctagctactcaggaagcggagatgggaggatcacgtaagcccaagagtcaaggccacagtgaaccgatattgcgccagggcaacgagagcgagaccctgtctcaaaacaaaaaacaaaccttcttttttctagacagggtctcactctgtcacgcaggctggagtacagtggctcgatctcggctcactgcaacctctgcctcccaggctcaagtgattctcatgcctcagcctcccacatagctgggattgcaggcatgcaccaccacatcctgctaatttttgtatttttagtagagacagggttttgccacggtggccaggatggtctcgaactcctggcttcaagtgatccgccggccttggcctcccaaagtactaggattataggagtgagccactgtgcccagcctaaaaacattatttttaaaaaaattaaagaggacctgctaggtgaaaagaataaacatcatgatcatggttatcatcattataatgtctattgtggattgaaatgtagctcctgtttggccctcttgtaagggctttatgtaaactcagtttatcctgaggctcacagctattccctgacttgctgaaggccacacaactggtggtggaaagccaggatacacatctagactgtctgagtgcagaacccttgctttcagctactacagcagccccttccttggcctggtgtaacgatgtcacaggcttgaaagtcaagcctttgcacctctcacagggggcagggcatgccccagaaactcaggcctctgctgatggggtccctactccaaccttcagtgtgtggcttggctcttttctctaacctccttttggacaaacgtcttttctgtttctgctggggaccttaatcacttgtccagaaactccatggattttgtccctaaaaatatgatttcttatgatcccttctcccaagatgctctgagtcccttgactttatcttcttttaaaatttgaagtatgtcgggtgaggtggctcacgcctgtaatcccagtactttgggaggctaaggtagatggatctcgaggtcaggagttcgagaccagcctgaccaacatggagaaaccctgtctccactaaaaatacaaaaattagccaggcatagtggtgcccacctataatcccagtcactcgggaagctgaggcaggagaatcacttgaatccaggaggcggaggttgcagtgagccgagatcacgccactgcactccagcctaggaaatagtgcaagactctgtctcaaaaaaaaaaaaaaaaaattttgagatataattcacatacatgcataaaattcaccattttaatacccttctgtggcttttatttattatttttatttttgagacagggtcttgctctgacacccaggctggagtgcagtggtacaatcatagctcactgcagccccaacctccttgggctcaagtgatcctcctgcctcagcctcccaagcagctgggactacaggcatacgccaccatgcctcgctaattttttttattttttgtagagacaaggtctcgccatgttgcccaggctggtctcgaactcctgggctcaagcgaacatactgcctcagcctctcaaagtgctggaattacaggtgtgagccagcatgccaagacaccagtgatttttagtatattcacaaagttaggtgaccatcactactacctaatttcagaacatttccatccccctaaaaagaaaccttctaccttatgacccttcagcagtccctcccgactcccattgcccagccccagcaccatctactttttgtctctggatttgcctatgctgagcattttatatccatggactcaaaatccattggctctctggccctctctcaactgacttctgctgccacctctccaccaaagtgtcttttcatcctgctgccaaatacaataggcacagctaaggcgacctcattctccaccactcaactgcattcaatgcaacccatcaccctctcactgcaaagctttctcctcttaatttgagaagctcctttcctccgacatctctgaactctcctccattttctttgcacttgcttctcttccaactgatctctaaatgtttagccctcagccctagcccccttgcagggagctgcattttgtctcacagcctcaaatatcatccctgtgcaatgattctcaaatatttatttctagctctgatttcttcctcgaactgtaagacttcacattcgatctcctcctttatgcttacgtctgactgctaatagcatctggaacattcaaaacatgactcttgatttctctctccttcacctccctcacacccattacccatcattatgaaaaataaccaggccaggcatggtggctcatgcctgtaatcccaacactttgggaggcggaggtgggaggatcgcttaaggccaggagtttgaggccaaccttggcaatatataaaggccccatctctaccaaaaaaaatttaccatagatagataaacaaattagccaggcatagtggtacacacctgtagttccagctactcgggaggctgaggcaaaaggattgcctgagcctaggaagtcaaggctacagtgagctacgattgcaccactgcattccagccaagcaacagagtgagaccctgtctcaaaaacaacaacaacaaaaaaaaaaacaaaacaaacaaaacaacaacaacagaaaaaagaaattaaaggtagaaaaataaccactacccatgagattgatcaagccaaaaactgaggcctcacctccctgtccactgtctccttaacacaaatcatccacaaatcccccatcagctctacctccaaactatgtcccagggccactcatgtctctctaactctacagccacccccatcacctcagccactaatgtcaccagcctggacaagtgccatggccagtctccggcagcagacgcccttctaaaacaaacatcacaccacgccgttccccttctgaaaggggcttccaagtggcttccaagctcccaccattgccgccaaggcctccttcttacctcacttcccatggctcccttccttgtcctggtgctcttgccaaaaggccttctttttgcctctccggtaggagaagcttattctgctgcaggggctctgtacctgtaagtgcccctgcccagaaggcctttcttgtccctctgcaactggctcgaacctcctggtcactctcatgtctggtccatccctgcctagatagagcctcgccccctccccagtcattccaccctgttacaggtcttttttcctttacagcacttatcaaaatcctgaacatttatttgctgactttaatgccagcttcgctggggggcagggaccttatctgtgtaatgtaaactggagctctgacacctaagagagtgtctggcacccaactgatcctcaatcaatatttgttgaatgaataaatgagtgttgttacagagggaaggtcgagggtacatcattaagtgtggcaaagtgcagaggagaacgtcattaagtatggcatgaatcctagcacttggggaaaattttagggtttttttgcagacagagtctcactctgttgcccaggctggagtgcaatggcgcgatctccactcactgcaacctccacctcccaggttcaaactgttctcctgcctcagcctcctgagtagctggggttacaggcgtgcaccaccatgcccagctaatttttatattttcagtagagacagtgtttgccttgttggtcaggctggtcttcaactcctgacttcaagcaatctgcccacctcagcctccaaaagtactcagattacaggcatgagcaccgtgcctggcctcacgtggggaaaattaaaggcggtaactgtgcaggtgaacttgaagacactcaaatgcttcccaaatctcccaggacatggctgacactgcctctagggcgtacagagggattgtcttaactttcacaggttgtcttaagcacttctgtaccattagaatttttttttgttttttatttttttcactatgagtatgtattacttttgtaattaaacaatttgatcagaaaaatagatcagttgattattttatctacaggatatttttaaaagtttgctagcagggtgcagtggctcacgcctgtaatcccagcactttgggaggccaaggtgagaggatggcttgagcccaggagttcaagaccagccttggcaacatagcaagaacctgtctctacaaaaaaataaagaataggctgggcatggtggctcacgcctgtaatcccagcactctgggaggccgaggctggcagatcacaaggtcaggagatcgagtccagcctggctaacacggtgagacccccgtctctactaaaaatacaaaaaattagccaggcatgttggcaggcgcctgtagtcccacctgcttgggaggctgaggcaggagaatggtgtgaacccggaaggcagagcttgcagtgagccaagattgcaccactgcactccagcctgggtgacagagcgagactccgtctcaaaaaaaaaataaaattaaaaaagaaaatgaataaagaaagaaagaaagaaagaaagaaagagcgagccaggggtggtagtgggtgcctataattccagctgctcgtgtggctgaggtgggaggatcacttaaacccaagagatagaggctgcagtaagccatgatcataccactgcaaaccagcctgggcaatagggcaagacgctgtctttaaaaagaaaaagtttgccaattttctctttgacccaaggtgagcacattacagtgattacaagcctgggagtccagtcatttgtaccatgttacacaggcaggagacagagggtctggtaaacacctctggggctgaactcatgcagatttcactccacgccaccactgactgcccagggaggtgtcagcgctcaccatggatgatgtggagtccaggaggctcacgactttcatctcgatctcgtcctcgccaaagctcttcagcagcttcataacctcactcagcgtcagccacttacaatccacaagctgaatggagacaatataatctccttcccgggctcctgccacctgaaaaagtattgttgaaattaagtcaacgttttgttcactcaaatccttgaatcagtccccattaacaaaataggtatttgcgtaagttcgcatcaagaaagcaaaaattcactttgggtggctgagacgggtagatcacttgaggtcagtagttcaagaccagcctgtacaacacggtgaaacccatctctactaaaaatacaaaaatcagccaggtgtggtggtgggcacctgtagtcctagctacttgggaggctgaggcaggagaattgcttgaacccgggaggcagacattgcagtgagccgagatcgtgccactgccctccagcctgggtgcaattaaaaaaaaaaaaaaaaagccaaaattggccaggcacagtggctcacgcctgtaatcctagcactctgggaggccaaggcagacagaatacttgaggccaggagttcgagaccagcctggccaacatggcaaaaccccatttctactaaaaatacaaaaattaggccgggccaggtggctcacacttgtaatcccagcactttgggaggccgaggtaggcggatcacaagatcaggagatcgaaaccatcctggctaacacagtgaaaccccgtctctactaaaaacacacaaaaaattagccaggcatggtggcacgcacctgtaatcccagctactcagcagcctgaggcaggagaattacttgaacccaggaggtggaggttgcagtgaaccaagatcgcgccactgcactccagcctgggcgacagagtgagactgcgtctcaaaaaacaaaaacaaaaactaaaattagctgagtgtggtggcacgtgcctgtaatcccagctactcaggaagctgagacaggagaatcacttgaaaccaggaagcagaagctgcagtgagccctgagatcgcgccactgcacgatcgcgactcactgcagcctccacctcccaaagtctaaaaaaaactaaaaacataaaacaaacaaaagaaagacagtaaaaattaatccttttcttttagggaatgtagcacccatgaggcccttcacatcaagtcaggcctttgacatgggtgaacccaccctaaattcaatcacccagatatctgtgtttgctgccaatcaagaaaagcatgtgcttaccgaggcagagcagtaaggatccaggaagtgaacctgaacgggggcgttccctctcaaggtgaaccccaagtccccttcttctgcagtgaagcggatgcttcgaggaggcgtccaccgcttgttagccgaaaacacagataaggggccctttggaagagagcatcgttaggtgtaggatttgaaggctggatcagacgcttgaaagctaaagggaattttgcctgctgtccttgaagatctcacttggccttgttcagggacaaatgacacatctgggggcatacatgctacagcagtcatgcgagaacctggaaagccatcttctcaaacatacccaatatattttcaataaaattatcttttaggcattgtattaattatctttttctctttttttttgagacattgtctcactctgtcgcccaggctagagtgtggtggtatgatctcggctcactgcagcctctgcctcccgggttcaagtaattctcctgagtagctggaattacaggtgcgaaccaccatgcctggctaatttttgtatttttagcagagatggggtttcaccatgttggccaggctggtctcaaactcctgacctcaggtgatccgcccgcctcagcctcccaaagtgctgggattaaaggcgtgagccaccgcacccggccaaaattatcataaataaaatctctaatataaaaaatgtaagactaggcatgtcatgcctgtaatcctaagcactttgtgtgaccaaggcagaaggatcgctcgaggccaggggtttgagaccagcctaggcaatatagtgggaaccattctctactaaaaacataaaagaattagccaggcatggtggtgcacgccaatgctcccatctactcaggctgctgaggcaggaggacttcttgagcccaggagttcgaggctgcagtgaactatgattgtgccactgcactccagcctgggtgaaaacagagttagaccctgtcttaaaaaaaaaaaaaaaaaaggaaaaaaatctcaggccaggcacagtggctcatacctgtaatcccagcactctgggacgcctaggcaggagtatggtttgagcccaggagttggagaccagcctaggcaagaccccatctctacaagaaatgaaaattagttggacatggtggtgtgtacctgtagtcccatctactagggtagctaaggcaggaggatcgcttgagcccagaaggttcaggctgcagtgagctatgatcatgccgctgtaatccagcctaggtgacacagtgagaccatgtctctaaaaaaactaaaaaatatttttaaaaaattttaaatagacaatacctaaaaactacctttaaaatatgctatggggccgggcacagtggctcaggcctgtaatcccagcactttgggaggctgaggtgagcggatcactggagcccaggagttcaagatcagcctggccaacatggtgaaaccccgtctctactaaaaatacaaaattagctgagcgtagtggcacaggcctgtaatcccaactactcgggaggctgaagctggagaatcacttgaacctgggaggcggaggctgcagtgagctgagatcgcaccactgcactccagcctgggcaacagagtgagactctgtctcaaaaaacaaataaataaaaataaatgaataaaataaaatatgctatggtctgaatgtttgtaccctcccaaagtttgtatattaaaatattaaaattttattaatatttattaaaatttaaaatgtatattaaaatcatcaatgtaattattaggaagtggggcctctcgagaggtgattcagtcttggggtggaaccctcaagaatgggatacatgcttttaaaacaggcccaaggaagctcatcaccttttctgccatgaggacacaggtagaaggccccacctataaaccagaacatgggccttcagcagataccgaatctgcccataccttggtcttggacttcccagcctccggaactaagaaatatatttctgctgtcataagccccccagtttgaggcattttgttatagcagcccacatggactaagacaccatactcgccaaagtgaagagctgtccccttaggtcatttgaatgtagagagcattcaacataccagcttctggaagaagtccgtgactgtcagcttggagaactggggcaatataatgtcaacctcttgctcagttttagctagaatagaggattagaaatgggaggataaacgtttctgtaattgaaagtgatcctaatagtccagtgttgtggctcacgcctgtaatcccagcactttgggaggctgaggcaggtggatcacttgaggccataagttcaagaccagtctagccagcatggtgaaaccccatctctattaaaaatacaaaaattagccaggtatggtggcaggtgactgtaatccgagttacttgggaggctgaggcaggagaatcacttgaacccaggaggcagaggctgcagtgagttgaagtcatgccactgcactccagcctgggtgacagagtcagactccggggggaaaaaaaaagtgatccttgggaaggagacagtacagaactttctcttagtcacacatccttcccctcggtttagacaagtagcagaagaagatggaacagagctcaacccccgacctagggtgaactgtaccttccatttgggtgcctccagtgagccatgggaggtataactccttcccgagctgggaccaaggagtgataaccagacacattcccatggggtttcctgatacttaaggggcttagtgggcttctctggcactcataaaaccctaatgaggaggccaggcacggtggctaatgcttgtaatcccagcactttgggaggccacggtgggaggatcatctgaggtcaagagttcaagaccagcctggccaacatgatgaaaccccatctctactaaaaatacaaaaaattagccaggcgtggtggcatgcgcctatagtcccagctacttgggaggctgaggcttgaaccagggaggcagaggttgcagtgagctgagatcacgccactgcactccagcctgggtgagacaagagcgaaatgacctctcaaaaacaaacaaacaaacaaaaaaacctattgagaagtcatctatgtttcaagtgttgttgttatggaagttccatgcctcactggacacagtcctgggataccgtgctttctgttttcatcattattactattttgagacagggtgtcgctctgtcgcccaagctggagtgcagtggtgggatcacagctcgcttgcagcttgacctcctggactcaaatgattctcctgcctcagcctcccgagtagctggaactataggtatgcaccaccacacctgatgaattttttttttaattttttgtagagatggggtctcactatgttgcccaggctggtctcaaactcctgagctcaagtaatcctcctgcctcggcctcccaaagtgctgagattacaggtttgagccaccgtgcttgaccttttcattattaatgtggtatgaggatttcccagtgaaaaggaggtttggcaaatcatgaccactgacagctacatacccccaccagcatcttcacagcaggctcggactacccttaacataaggctggtcaatttctaacaaaggatcccagggcaggctgattctacacgagaacaaacagcataaaaagtgtatctaggccaggtgtggtggcttaccctggtaatcccagcactttgggaggccaaggcaggtggatcacttgaggtcaggagttcgagaccagcctggccaacatggtgaaaccccatctctactaaaaatccaaaaattagctgggtgtggtggtgggtgcttgtaatcccagctcctcgggaggctgaggcagaagaatcacttgaacccgggaagcagaggttgcagtgagccgagatcacgccactgcactccagcctgggcaacagagcgagactccatctcaaaaagaaaagagaactccagggcaaaagcagcacctcagtccctaccctgtgcagctctccttgtgccaagcacacagcgagggctcgctcaacccccacaggccaggcgtactctttccgcggcacaggcacccccacagagggaacacagtctaggctactcaccaacaacactgggggcgtcgatcaggttcagcaggtcatcctcctcctggtgctgggcgtacgtgagccgggagcgttcctgtgcggcacacagcaccttctgtagcacctcaatgctccgcagcttcttgcagaggctggcctcccgcaccgactcctcgtgatgagccatggctctgcgcaagtgggacttccctgcagacggaagccagcacccacgtgacttgcagatccaccaagcagagcataaaggcccaaggggcagcccaagaggttggatgttctcttttctaaaggatctgcctggatagctagagcctgtgataccctaccttgttttaacctgagtgactctctcctagcagagagagccggacagactccattttagtttcttcacttgcagcccccacttatcccccttaagagaataactagtgtaagctgactccaagcacacccaggaatgcaaactgctgataagatactgaggcaggctgtaccagcagctcctggggatgtgctcagtggcaggtacctaaagcccctgcatttatctcttagtgatagtttaagcccctgcacctggaactgtgtattttttgtaactgcttctataaccaattacttttttttaactttttgcctattctgcttctgtaaaattgcttcagttaaacccccctcccctatttagaccatagtataaaagaaaatctagccccttcttcgggcccgagagaatttcgagcgttagccgtctctcagtcaccggctaataaaggactcctgaattagtctcaaagtgtggcatttctctataactcgcttggttacaacaagccttttattaaaatattatttttttcattttatattttatatttagagacagggtctcactttgtttcgcacgctggagtacagtggtgcaatcatggcttaccgcagcctcaaactcctgggctgaactgaacctccctcttctgactcttgagcagctgggaccacaggcatgcaccaccacacttggataatgttttcactatcatcatcatttcattatcattgctatgttgcccaggctggtctcaaactcctggcctcaagcaatctgcctgccttagcctcccagactgctgggatgacaggcgtgagtcaccgcgcccagcccaagcctcccttcaatgcgtatgtaataacctcacttgtgtccataagatgttcactcaacaaatatttaccaaatgtgctgggcactagagataaagcaacgagtaaacaaactgcccccacattcatggagtttacatgtagtggttgacgacagataactaacaagacaagaaatatgtaatggatggggtggtgatgaggttatagggaaaaataaagcagggtaagcggagatggtaagagaagactgggaatggggttgtcctatgatgggtgacagagaaaggctttttttttttctttcttgagacggagtcttgctctgtcacccaggctggaatgcagtggcacgatctcggctcactgcaacctccacctcccaggttcaagcaattctcccacctcagcctcccaagtagctggaactacaggcacacaccaccacatctggctaagtttttgtatttttggtacagacggggtttctccatgttgcccaggctggtctcaaactcctgacttcaagccatcctcccacctctgcctcccaaagtgctgggattgcaggtgtgagccaccacacccggccaaggaaagctttgtgatatggtcctttttgagcagagccctgattgatgtgaaagagcagcaggtgcgagggccctggggcaggggcacgtgcaggttttcaagggcaaggaggagctagggtgtgcctggaggcagggagggtgggagagaatgagtgcagggaagaaagagccaggccagatcatggcggacctcacgcgtgtgagatgagggctctcgctcctgttctgcgtgagacgggagcccactggagtgagagcaggggactgatgtgatctgacctgcacgaccaggctctgaaggggcagcaggaaaacccgctatgagcagggcaagccacgtgacctctctgggtctcagtttcctcagctgtaaaatggggatgccacgagacgcacctcatagtgttgtgtggggtttaagtgagtgaatgtttgttaaataagcactgtacacatgtggcttccaccagggcagcaggattaaagtggccagatttgagatatgttttctaagtacagccaaagggatttgctaatcaaatgtagggtgagaaagtaagacaagaggttaggtgtggtggctcatgcctgtaaacccagcactttgggagacagaggcaggaggatcgctggaggccaggagttcaaaaccagcctgggcaacatagtgagaccgcatctctacaaaaacctttttacaatattagccgggcgtggtggtgcatgcctgtagtcccagctactcaggaggctgaggcaggaagatcacttgaagccaggagttcgaggctgcactgagctgtgattgcactactgcactgcagcctgggggacagcaagatgctgtcaaagaaaacaaatgaaagaaaaggaaagaggaaaggagggaggacgggtagatggggaggagagagagagaaaggaaagaaggaaagaataaaggagagaggagaggaaagggagagaaaaggaaagcaacaaggaacaaggaaaggagaggagaggggaggggaggaggggagaggggaagggtgaggggaggagaggaaggaggggagggagagggaggaccagaggagagaggaaaggaggggagaagagaggaggagagagaaggggagcggagggtaacaggggagggaagaggagaggagagaacaggagaggaggggaagggaggggaacagaggggaggagaggggaggggagcagaggggaggggatgggaaagaggaggaaagaaaagaagcgtggagagtgagtccaaggtttctggcctgagcacctagaggggtgggagttgccatcactgagacggagaagctgcgtatgtgtgcatgggtggtgcgcagaggggcaggttagggtggtggaggtgaggtctgcacatgggaagagatattcacactgagacatggcagagaccaaaccaggacactgcattaccagtcattaggtgttcttggtaattcagccatgcataaggaaatcaacaaacgtctccttccctgttagcgtgacacatgccaccctgtggaccccaagggagatggttaaagtcctggctccacagtgggaggcctgggtgctatggaacccatgagaacacagcctgggaagccctctgaggctcaggaccgcgcctcatgacttctgaacccaaagtggccacgatgactcggaacacccccctctcccgggccctcttcagggacctctctgtggctggctgtgagcaggaccagctgggcaccaagtggggcccacatctgggtgcagggggacacgcacccagctgtcggcgctgctgatcattcttcagtgtggccaagggtgtcagcccctctggcatgtggtcgtagagctgggacaggcacttctcctggtggtccagatccgtgcctggcttcactgcaaagagaaccacaggttaaatcccctctcatggacctggccacagacccacgtagagatttctctaccatgtctccagcttccttttttctgcagtttcacaaggcatttgggatcatgggtctcctttctgcccccggacacaccccaggccgtctaaccctcaaggttttcttttctttgagacggtctcactctgttaccaggctggagtgcaatggcacaatcatagttcactgccgccttgaactcctgggctcaagtgatcctcccacctcacctcctgagtagttaggactacagacatgcaccaccacatgccaggctaatttttaaatttttttgtaaagacaaggtcttgctacattgcccaggctggtctcaaacccctgggttcaaacgatcctcctgccttagcctcccaaagtgctgggatcaaatgtgtgagccactatgcctggctaccccaaagctcttgctcactgggaccagtcacactccagaggttcataatttttttttttttttttgagatggagtttcgctctgtcacccaggcttgggtgcagtggtgtgatcttggctcactgcaacctccacctcccgggttcaagcgattctcctgcctcagcctcccgagtagctgggattacaggcacatgccaccatgcccggctaatttttgtatttttagtagagatggggtttcagcatcttggccaggctggtcctgacctcgtgatccacaccgatttcggcctcccaaagtgctgggattataggcgtgagccaccacacccggcaaggtttgtaatttgaccctgagcccccacacgctacctcctccaactcacccaccacacagaacctcctggcatagcccagaccctgtcatgcccggcctgcacccctctgcgggcctgcacacctgcagcagagccccttcctgcttcaaccacacccttcgtggcgcgcatcctgctctcaaacctcacaaaaccactctccacttccccagcaccctccgcctctgttctgtgctcagacactttactccctctaggctgacccttccctcctgtgcagatggaaaagttgaactcaaatgtcactgcctctaagaagccatccatgactgtaccatggagtccacctgctgctgcatttgtgtctctacagcaatcaccgaggcactatatggtatttctatttgttttcacatcttgtctcacctaatagactatatagtactaggagtggcggctcacactttcagagaacctacagtatataaagcattattgagctttgcgtacaggcccttcgttttcgttttcatgacagcctgtgaggcaggttctctccatatacccattttacagatgagaaaattgaggcagaggacagctaagtaacttgcccaaggtaaaacagctcattcatggaagagctgagatatgaacccaggaagtctggctccagaggctgtctttttaattccttgggaggctgcctggattagtactcattagatcaaaaatccctggccaggcaccatggctcatgcctgtaatcccaacactttggggaggccaaggcaggacaactgcttgaggccaagagtttgaaaccaacttaggcaacatagtgagactccatctctataaaaaaaaaattttttttaattaactggtgtagtggcatgtgcctgtattcccagctatttgggaggctgaattgggaggatcgcttgagcccaggagttcaagaaggcagtgagccatgatcataccactgcactccagccccatctctaacaataaaataaaataaataaaataataaaataaaataaaattccgatcatcacagattttttttgcattaatttttattttattattattagtttttttgagatggagtcttgctctgtcacccaggctggagtgcagtggcacaatctcggctcactgcaacctccacctccctggctcaagccattctcctgcctcagtcacccgagtagctaggattagaggcacgtgccatgccctgctaatttttgtatttttagtagagacagggtttcaccatgttggccaggctggtctcaaactcctgacctcaaatgatctgcctgccttggcctcccaaagtgctgagattacaggcatgagccacagcacctggcctgcattaattttgattcttttaaaatattaccttaaaatgttacttatcttgatgccagcatttttggccttcccttagattctagattccaggtgaaaattcatcctcttgcacccaggcagaattaaaggtgcctcttcttcctccctctaaagaagcttataacccctaaccccaccatggcctgtgcggcagctgcctcagtcatgggtcactcccatcctctgccttcagcctgtgagcatctccagggaaggcagttagctctcactcagctcagaatcgcccctggggcagctggaccacagccctcgccaaactcccgaaccccccaggccttaccctggtggtcgatgaggaggatggcagtgaagtagtgggccagggccgcgtagtggtgggccttcacgcaggctaagctggcccaggagtaggggatgttctctttcaccggcgcctggctcatggctgcgtgtagctgttggtagacctctcccacctgaaatagaagggacactgggaaggggcagcccggcacaagggccctcatgaacccatttgcagagaaagagccctttcttcttcccatgcaacagcccctgccaggggctgctccagaatctgggagcaactccaagagacccctcgttctgtcattgtcacagttaacagggggatcaggctgctgtcattatgctggtttttaggttaagctgcagatggaatcagtgatctgtatctgaaacaccaacacttgccaagaaaactcaagccagcagtactggccggagctggcacaatgcccaggtcacaggcaagctcccatgggaaggccccgctacttccagtgctcctgtgccagcatctcctgcccactccccaaagtcacaggaaccagggagtcctaccttagcagcctcctgagccaccttcaccagcatgaagaattcattccggatcccaggaaggctgattttctcaaacacgctttcttgggcttgtgcaagcatcattttgacgagcacgctgagcatggcagggctcatgtcgtaacttggagtatgggtaaatgtgtctttcaggtaatttaaaacccctaaaagtggaaaatgttttgcccattagttcgggttcatatttacttcatcacgttgctatagagaaagataggaggccgagtgcggtggctcatgcccataatcccaacactttgggaggccgaagtgagcagatcacttgtatcaggaattcaagaccagcgtgggcaacgtggtgaaaccctgtctctacaaaaaatacaaaaattagccgggtgtgatggtgtgcgactatagtctcagctcctctggaggctgaggcaggaggattgcttgagcccaggaggcagaggttgcagtgagctgagatctcactactgcactccagcctgggtgacagagcaagactctgtctcaaaaaaaaaaaaaaaaaaaaaaaaaggaaaagacaggagaaaaaaaaaagaaccggtgtcctacaacatattaaaaaatttgattctcaattatatggtccagcaattccactcctatgatatatatccccaaacaattgaaagtgggggcttaaatgacacttgaacacccgtgttaatagcaacattattcacaagagctgaaaagtggaaaccacccagacgtccatgagcagatgaatgattaaacacaatgtggcctatccatacaacagaatatttttcagccttaaaaaggaatgaaattctgacacatggtacagtgtaaataaggacattatgctaagtgaaacaagccagtcacaaaaggaccaatattgtaggattccatttagataaggtacccggaatagtcaaattcacagaaatagaaaggagaatagaggttagctggggctggaaaagcgggcaatgggaagttattgtttaactgagtacagagctttgctttggatgatgaaaaagttccggagatagctgggcacaggggctgctgcctgtaatcccagctataaaggaggctgaggtgggagggttgcttgacattaagagttcaagaccagcctgggcaacgtactgagacccctgtctcttaaaaaatatatactttttaaaaatgtatttattttatttatttttgagacaagatcacactctgttgcccagactggagtgcggtggcacaatcatggctcactgcagcctcaaactcctgggctcaagcggtcctcccacctcagtctcctgaagagctgggactacagccatgtgccaccctacaccaagctaattttaaaattttttgtacagatggggtgtccctatgttgctcagactggtctccactcttggattcaagtgatcctcctgactcagcctcccaaagtgctgagattacaggtgtgagccaccttgcctaaccaacaaaaaaagtttttaacttctggagatgtttagtggtaatggctgcacaacactatgaatgtacaaatgcacttaatgccattgaactgcacacttaaaaatggttaaaatgtgcttctggttggcaggataattttaaaatttttaaaatttaagataataattaaaatggtaattttatgttctgtgttattttactataataaaaaaactggttaaaatagtacattttaagttatatatgtatattttaacactatttatttatttatttataaataaacacccaggctggagtgcagtggtgtgatttcagttcactgcaacctctgcctcccaggttcaagcgatcctcctgcctcagcctcccaagtagcagggattacaggtgtccaccaccacacccagctaatttttgtatttttagtacagacggggtttcaccatgttggccaggctggtctcgaactcctgacctcaggtgatctgcctgcctcggccactgaaagtgctgggataacaggcgtgagccaccccacccagccttttaacccaatttttaaaaattggattaccttccaaaacacatctctattgagtaaagaaaccagcctgctccccacaactcctgtgtcacctgggacaaaattccatcacgacaggtatggagatgcaagcagacggcaggcagaaggactaaggggctcacaggggaccaggctcacacataagatctgagtcattcagcagtccagggcttttcccctggacctcaagaaagatctattctggccaggcgtggtggctcatgcctctaatcccagcactttgggaggccgaggtgggcggatcacctgaggtcaggagttcaagaccagcctggccaacatggcaaaagcccatctctaccaaaaatacaaaattagccaggtgtggtggtgcacgcctataatcccagctactccggaggctgaggcaggagaatcacttgaacccgggaagcagaggctgcagtgagccgagatctcgccactgcactccagcctgggcgacagagtgagattctgtctcaaaaaaaaaaaaaaaaaaaaaaaaatctcaatccgtctgctccaatggaaattttcatgctgcagccttcctctgacttctttgtagtttagaaaattaactgtccaaagcgctaactgacaatcaatctggaactgaaatagaatctctcatatgaatcccatccaactggttcctctggttttgttgctgagcaaaaaaaaaaaaaaaaaagccctgccctgcggagggatggcacctgctgttttgagctgcgagctccatgggggttccctcacactccccactgttctcctacttgcttcatttcgtctatagtttgtctccattgatataatctcagagacaggacacagagtgcctgcctaagattcctcagaaagatgagtccagaaaaaagatttacagcaaaagaaatcaactcatacttggaatcttagcatatcgcttcatcccgatagaccaatcttttatttttttaattaattaattattttttgggacagggtcttgctctgtcgcccaagctggagtgcaatggcgcgatcttggcttaccacaacctcggctgatccttctgtctcagcctcccaagtagctgagactacaggcatgcaccaccaggcccagctaacttttgtactttttgtagagatggagtttcgccttgttgcccagactgatctcaaattcctgggctccagcaatccacccacctcagcctcctaaagtgctgggattacaggcatgagccaccatgcccagcctatttcattaatttaaaaaaaaaaaattctttttagggatggagtcttactctgtcacccaggctagagtacagtggtgcaatcatagctcactgcagcctcaaactcctgggcttaagtgatcttcccgtcttagccactggagtagctggaactacgggcatacaccaccacgcctggctaatttttaaatattttgtagagatggggtcctcctgtgtggcccaggctggtaggaccaatcattataacatcagaaatttcacgatgagtcaaagtggcaaagctatggttcttcacaagcttgcagggcaaagtgatatcaaacaatgatccacacgggtggaaggggatcacaccccaaagcagaatgtcgatgatcagcccagaaggcaacacgctatagagctagcgtggggaacacactgtggtctacactgtgccctgctcttgcatccatccccacgtggagtctgacccagacacagccctgctatgggggagcaaggcagaacccgcaggcacaggtgagccaagccaggctcacccacagcgctgggtctgttgaccccagtcctctataggtgtaagcactaggctgcttttctcctcaacaccgcacctcattctcatactaagattacctgaggtcaggagtttgagaccagcctggccaacatggcaaaacctcatctctactaaaaatacaaaaattagccaggcatggtggcaggcgcctgtaatcccagctacttgggaggctgaggcagaagaattacttgaacccagtaggcagacgtcgtagtgagcagagattgtgccactgcactccagcctgggtgacaagagcaagactctatctcaaaataaacaaataaataaaataaaataacaaaagacagttcccagaagaagggaactgagctatgagacatcctttgaatgcatcacttgacaaagggttgagaacacccacctcatgctggagaagttggcagaatgcaggtgatataaaggcatggaggggcagggtgcggtggctcatgcctgtaatcccagcattctgggaggctgaggcaggcggaacacctgaggtcaggagttcgagaccagcctggccagcatggcgaaaccccatttctactaaaaatacaaaaattagccaggtgtggtggcgggtgcctgtaatcccagctactcaggaggctgaggcaggagaattgcttgaaaccaggaggtggaggttgcagtgagccgagaccatgccactgcgctccagcctgtgcaacaagagcaaaactccatctcataaataaataaataaataaataaataaataaataaataaaggcacggagagtaatacgcactgataaggtacacctaatacaagaaaaagaagcctacagtttcactatttgggaaaagttattctgctcttcatgacagtgttgaaagaaacagttatgcactgccatcccaggggccacttgtctggaaaagatcgtcagccacaggattcaccatgtacatcagccatcccagactgaggtctgaaccaccgagcaagtttttttttttttttttgagatgcagtctggcctcgatctcctgaccttgtgatccacccgctttggcctcccgaagtgctgggattacaggcgtgagccaccgcgcccggccggagcaagtttcttaatgggaagttacaccagagctggagactggtctggcccttgcgagggatgacctgtagattctcttcagtggggggtcccctggtgccaccgggtggggccaaggctccgtctggtcagccctggaggagacatacctgcggctctctgaaaggcatctatggcactctccagcccagcctgcgtctgccgatcacaccgggtcccaatctgggtgtagagggccccagtgttgaacaggacactggccttctccagcagcaggttctgctggctgaccggaaccccggtgagagagtcatacctatgtgaaagaaatgcattccgagaatacagattacttggctagttaatgctacaagtggaaaaaattctttttttttttttttttaagagtcaatatctcactctgttgcccaggctggagtgcagtggtgtgatcatagcttactgcagccttcaactttagggctcagttgatcctcccacctcagcctcatgagaatagctggcattactggtgcatgccaccatacctgcctttttttttttttttaatttttgtagagatggggtctatgttacccaaactgctgtcaaactcctgggttggctgggtgcggtggctcacgcctgtaatgccagcactttgggaggccgaggcaggtggatcacctgaggtcaggagtttgagaccagcgtggccaacatggtgaaacccagtctccaccaaaaatacaaaaattagccaggcatggtggcgggcgcctgtaatctcagctactcaggaggctgaggcggaagaatcacttgaacccgagaggcggaggttgcagtgagctgagatcgcaccactgtgctccagcctgggcgacaacaacaacaacaaactcatttcttcagtaaaagtcaagaatgcatgtgcactgaggcttttgtttccaagcaagatgacaggactaatcacactgaccgccacagccacacacaaaaatatctgacggggtaactggataaacacaccatgggacatccagacaatggaatattactcagcactaaaaatggagaaatgaaccagcaagccatgaaaagatgcagaggaaacattactaagtgaaagagccaacctgaacattgctacctactgtatacgctgtgtgattccaacattctgaaaagccaaaaccctggagacagaagaaagatcaggggttgccaggacttagggggagggagggagggggagcacaaaggatttttccagtagtgaaactcttctgtatgacactgcaaaggtggatcactgtcattctatgttggccaaaagccacagaatacacaagtgcaagaatgaaccctaatggaaactatggactctgggtgataatgatgtgtcaggtaagttcttcaattataaaaaaaaaaaatgggctgggagcggtggctcatgccagtaatcccagcactttgggaggccaaggcggtatggcttctcctaaatgaaatatggcaattactaacccctcataattctttctgaaatctaaaaactcaggatttgttttaatttgttttactttttattttttcagacaaagtctcactctgttgcctaggctggagtgcggtggcatgatcatgactcactgcagcctcaacctcctgggcttaagagatcctcccatctgagcctcccaagtaggtgggactacaggcatgcaccacccatgaccggcaaattttctctaattgttttgtagagatagggtctcactgtgttgcctagactggtctcaagctcctgggctcaagcgatccacccaccttggcctcccaacctgctgggattacagatatgagccaccacacccagcctaggacttgttttatttttattttttttattttttattttttgagacagagttttgctctttcgcccaggctagactgcagtggcgccatctcagctcactgcagcctccacttcccggattcaagtaattctcctgcctcaacctcccaagtagctgggattacaggcacccaccaccatgcccagctaatttttgtatttttagtagagacagggtttcgccgtgttggtcaggatggtcttgaactcctgacctcaggtgatccacccacctcggcctcccaaaatgctaggattacaggcgtgagccaccgcacctggccctaggacttgttttaaagtttactcatgaaccagggggtgtgcagacagcttctccctaattcatgactaaggagaaaccacctttcgccttttcggccatgcagacagcctggtgcattgttaggaaaagtcatccccctttcctttgctttccatgaggaaggcattagtagccacccatcagctgtagaaacattgaattctgatatgcccctgatcttctaggatgtgttctcctttcactgacactcctaacgacactcagagaaggggtgcagcatctccaaagtacttttttttaggttgtttttttttttttttgacacagagtctcactctgtcacccaggctggagtgcagtggtgtgatcttggctcattgcaacctctgcctcccgggttcaggcgattctcctgtctcagcctcccaagtagctgcgactacaaggcacgcgcaactatgccttgctaatttttgtactttttactagaagcagggtttcaccatattggacaggctggtctcgaactcctgacctcgtgatctgcctgccttggcctcccaaagtgctgggattacaggtgtgaaccaccacgcccagcctttttttttcttgtttgaaaaagggtttcactcctatcatccaggctggagtacggtggtgtgatctcggttcactgcaacctccgcctcccgggctcaagtgattctcctgcctcagcctcacaagtagctgggactaacaggtgcataccatcatacccagcaaatttttgtattgtttgtagatatggggttttgccacattgtccaggctggtctcaaactcctgggctcaagtgatctgcctgcctcggcctcccaaagtgttggcattacaggtgtgagccactgtacccggcctcccaagtatttaaactatactaacctttgaaaataccaattgggtctacggccataccaccctgacgtgcctgatcttgtctgaaaataccaattgtggagaagaatcaaatgctctacttcctttttttaaatctgatctaagctgagtgagtagctcatgcctatagtcccagctattcaggaggctgaagcagaaatatcacctgagcctaggaattcaagactagcctgggcaacacagtgagaccccatttcaaaagaaacctgatctatttctgtttggtgcttttgcctcactggataagacctgattttctctctctctctcactcacacatacacatgcatgcccctgtccaatctgagataagaatctcgcttctggctaattccacttcagagcccccgtgcttccccagtgatacaacgagcaagaaaaatgtctcttctccttggctcgcttgttctgagaagcaagaggccacagtctgttggagccatctcccctcggatcaccttcataaataaataccaatgtattgacatcttttgagacttccccagataaatgcaagataggaaagggggctgaggtgcacaggggcacccgcagaggggcgtctgtgatgctgaggctccaaaattgtggctgccataacacgtgaagcgccagcgcagacctcaagcacctaccaggtgaacaggagtcccatctgccgtgtgggcgggaagaatcgactctcgacaaagcccagctggatgaagtatgtcatcagcagttccaccccggcctcatcccggctaggcgtccgacaagcctgcaaggaaaagaacccaagagggcatgagcagaggaggacacagctgatggcccttcccagaaggtgccctgcacataccagcaggtgcctgtaactatttctgcagtatgatgacctcgctactggcatcgtaaactctgggaggggtggaaagaacctgggaggaagtcagaaatcctggaatccagtcccagccctgaggcagggctctccccttctatggttttccttctttttttttttttttttttgagacagagtcttgctgtcacccacccaagctggagtgcagtggtgcgatcttggctcactgtaacttccacctaccaggttcaagtgattctcctgcctcagcctcccgagtagctgggattacaggcgtgtagcaccatgcctggcttgtttttgtatttttagtagaaacagggttttgccatgttggccagtctggtctcaaacttctgacctcaggtgttccacccgcttcagcctcccaaagtgctggaattaccagcatgcaccaccacgcccagctaatttttgtatttttagtagagacagggtttcaccatgttggccaggatggtctggaactcctgacctcaggtgatccgcccacctccacaccccaaagtgctgggattacacaggcatgaaccaccgcgcctggcctccttctacagttttcttatgcagcaagtggaatggatgattccagcaccccccaaccatcacctctatccacccgcgattctgttaagaccacaagcgtgcaataatggggttccctgaagactcggaaaagccaccctcccctctctgctgcacacaaaaacttacttgtctcagatccataagatctgcaatttcatcttcatataaatagccatcttcactgtaatgttccaggataaaatccttaaagaaaaatgaggtcagatgttataaagtgtggctgaaaaccatatgtgtgcataatagtaatatgtcaattgtgaacccatttttaaaaaggcagaataaagaaaaacttatagtgattttcaaagtgggggaatttattttcttaatttatgtagttttttttaatacggagtctctctttgtagcccaggctggagtgcagtggcacaatctcggctcactgcaacctctgcctcccgggttcacgcaattctccttcctcagcctctcaaggagctgggattacaggcgcccaccacaatgtctggctaattgttgtatttttggtagagacagagtttcaccatgttggtcaggctggtctcaaacttctgacctcaggtgatccccccacctcgccctcccaaagtgctgggattacagatgtcagccaccgtgcccggccatagtttttttttaaaaaaacaaaaacaaaaaacaaaaaacagagtttcactcctgttgcccaggctagagtgcaatcttgcgatctcggctcactgcaacctccacctcccaggctcaagtgattctcgtgcctcagcctcccaagtagctgggattacaggcatgtgccaccatgcgcagctaatttttgtatttttagtagagatggggtttcaccacattgcccaggctggtctcaaactcctgggctcaagcaatccatctgcctcagcctcccaaagtgctgggattacaggtgtgagccactgcaacacacgcctatgtttttaaatgttgtgctgcttcagtaaaagtgagagttgaagtaaattttttgcttaaaaatgtctttgtgtctgcgcatcgtggctcacgtctgtaatcccagcactttgtgaagaccaggcaggtaaatcacttgagcccaggagttcgagaccagtctatggcctatacattcaactatactgcaaacactgcagctattcaggggctcagacttgcaattctgggcctccctcaggacccggacaagtttcccagcacagatcctgagggtaggactgtcaataacagtctccagatacaggtttcctttgccaagaagacccttaaccatgttataaaggcattttattttattttactttattttattttattttattttatctttgaggcagggtctcactttgttgcctcggctggagtgcagtggtgcgatcgcggctcactgcagcctcaacttctccaggctgaagcaatcctcctacttcagcctcccaagtagctgggaccacaggcacgtgccacaagctaatttcatttttgtgttttttaatagagatggggttttgccctgtcgccccacccccgcccctacaagtgctggctcccccaagctgcaagaaaggtgatcacatagatcgctcaattatgtcttcccaagtgactgtgagtaacctctttacacaacttttacattaaagctcctcctgtttttgtgtgttcaacatacagacacacaaacagacaaacacttgtcttacaaaaatggatttgtactaaatacacaactttgctgtgccttctttttctttttttaagagatgagggtcttgctctgtcgtccagggtggagtgcaatggtgcaatcatagctcactgcagccttgaactcccgggctcaagtcatcctcccacttcagcctctccaggagaggggactataggtgtgcaccaccacactcagctaatattgttatttttcataaagacagagtcttcctatgttgcctaggctggtctcggactcctggcctcaggtgatcctcccacctcagcttcccaaagtgttgggattacaggcatgagccactgcacccagctgactatgcctcttttctttaaacttggccatgggctgggtatggtggctcacacctgtaatcccagtgctttgggaggctgaggtaggtagatcacttgaggtcaggtgttccagaccagcctggccaacatggtgaaaccccaactctattaaaaatttaaaaaataaaaaaataaaatagctgggcatggtggttaaaaggggtcaggtgtagtaactcatgcctgtgatcccagcactttgggaggccaaggtgggagaatcacttgagaccaggagtttgagaccagcatggacaacacagtgaaaccccatctctacaaataataaaaaattagccaggcgtgctgaggcaggaggaggatcacttgagcccaggaggttgaggctgcagtgagccatgatcacatcactgcactccaatcttatgaaagtcaaagaggattttgattaaattttatatgtgatcctgaatttgaaacttagtaaactagggtagattaacgtacttagtgggataaaaaaattatctaactggccaggcacggtggctcacacctgtaatctcagcactttgggaggccaaggcaggtggatcacttgaggccaagagttcaagaccagcctggccagcgtggtgaaaccctgtctctactaaaaatacaaaaattaaccaggcatgctggcaggtgcctgtaatcccagctactcaggaggctgaggcaggagaatagcttgagcccaggaggcagaggttgcagtgagctgagattgagccattgcactccagcttggatgacagagcgagacttcgcctcaaaaaaaaaaaaatcctaactgaaacccactgtgaacattagggacaaaatgagaatttctaccatcactgttattacttagcctaattccaaacattctctagcccacacattaagaaaaataagagacataaaatattagaaagaaacaatcaaaataattttttgcaacgtaacagcatgtttataaaacccaatagcatcaactgaaacattactaaattaataagaattcaataaagtggcaaagaatttaacacatgaaagtcaatagtaaaaaagaaaagtcaatattcttcctttcttatacaagcaataaccaattagaaaaacttagcagacagccaggtgtggtggctcacatctgtaatcccagcagttttcaaggctgaggtgggcggatcagttgaggtcaggagtttgagaccagcctggccaacaaggtgaaaccctgtctctactaaaaatacaaaaaattagctgggtatagtggcaggtgcctgtaatcccagctacccaggaggctgaggtaggagaatcacttggacctggggggcagaggttgcagtgagccaagattgtaccactgtactccagcctgggcaacatagtgagactctgtttcaaaaacaaacaaacaaacaaacaaaacctaacagagaaataatacctttcacaatagcaacaaaagtacatttctagggataaaattaatataattaagcagaaaactgttaaactttactgaagaacagatgttatttcattttctttcattgattcgaaattttttttttttttaaatgagacaagttatcattctgttttccaggatggagtgcaggggctcaatcatagctgactgcagcctcgacctcttgggctcaagcaatccacctcaacctcccaagtagctgggactaaaggtgtgagccactgtgcctggccctatttctttaaaataaaacaaaatcggccagctgctgtggctcacgcctgtaatcccaacactttgggaagccaaggagggtggatcacttgaggtcaggagttcgagaacagcctggacaacatggtgaaaccctgtctctactaaaaatataaaaattagctgggtgtggtggtgggtgcctgtaatcctaggtactcaggaggctgaagcaggagaatcgcttgaacctgggaggcagaggttgcagtgagccaagattgcgccactgcactccagcctgggcaacagagtgagactccctctctaaataaatagatacataaaataaaataaaacaaaatcacactgtgaagcttcactgattataaaacatcacacggacacacaagtcagatttgaaatggaactgccgtaattcagtctgctgaaccacttctgcagtacctgtgtttctatcaaatatggaagggaaaaaatacaacagaaagtccgtcaaacgttctcattttcatatgactgacatttgtagagtctcttttaggctaaaatgacatggttggaagcctgtgccgaatggcagttggccatgtccacaacatgtgaatattttcatttgctttaatgtggaattcagaacatgacccagttgaatccttaaaaatgcctataaaattcctaagtttctccaagagactcttcctttaaaatgcttgcattcttggccggatgcagtggctcacacctgtaatcccagcactttgggaggctgaggcgggtggatcatctgaggtcatgagttcaagaccagcctggccaacatggtgaaaccatgtctctactaataaaaattagccaggtgtggtggcacatgcctgtaatcccagctacttgggagaatgaagcaggagaaccgcttgaacccaggaggcagaggttgcagtgagctgagatcgtgccattggactccagcctgcgcaacaagagtgaaactccatctcaaaaaaaaaaatgcttacattcttgtagcacagcaccaagcaacagacaaattaaatcgtaaagaaacttctacaacagcagcaacagacatttctagacatgtggattgttttgagtcccacagaccagtggcaagtcacatctatttttgcatttatatatatacacattacacatatattttaaataaaaatagagatgcggctgggtgtggtggctcacatctataatctcagcacttttactggaggtggaagcaggaagatcacttggggccaggagagttcaagaccagcctgggcatcatagtgaggagaccccatctcttaaaaaaaaaaaaaaaaaaaaaagagagagagagatgactggccatggtggttgacgcctgtaatcccagcactttggaaggccgaggtgggcggatcacctgaggtcaggagttcgagatcagcctggccaacatggtgaaaccctgtctctactaaaaatacaaaaattagcctggcacggtggctcatgcctctaatcccagcactttgagagcctgaggcaggtgtatcatgaggtcaggagttcaagatcagcctggccaggatggtgaaaccccgtctctactaaaaatacaaaaattagccgggcgtggtagtgggtgcctgaaaccccagctactcaggaggctgaggcagagaattgcttgaacccaggaggtggaggttgcagtgagccgagatcacgccactgcactctagcctgggcaacagagcgaggcttcatctcaaaaatatatatatacacacacaaaaattagttggccatagtggtgcatgcctgtagtcccagctactcaggaggctgaggaaggagaatcgcttgaacccagaaggtggaggttgcagtgagctgagatcgcaccattgcactccagcctgggcaacagagtgagactgtgtctcaaaaaaaaaagagagagagagagagagacaaggtctcattctgttgcccaggctggtctcaaactcctggcctcaagctgtcctcttgcctcagcctcccaaagtgctaagattataggcatgagccattgcatctgggcataagtctcaggtaaaagttcaggcaggctgtggcagtgtggcataaagctgcaattcccgaattgttttcattgctttctacccagaatacaaactttccagtaaacttgagtcctgaaacattcagaataccaacttcccttctccaattccaaaataaaccccaaactcacaggatttaaacaaggcagcagtcaaaaaggcctctatttatgtcaaacaactcactgtctctgagaatgaacgtcaagtgcttccaaagtattaaccaattgcttttaaaagtagtagttggccgggagcggcggctcacacctgtaatcccagcactttgggaggccgaggcgggtggatcgagtttgagaccagcctggccaacatagtgaaaccccatctctactaaaaatacaaattagctaggcatgatggcgggtgcctgtaatcccacctactcaggaggctgaagcaggagaatcacttgaacctgggaggcggaggttgcagtgagccgagatgccgtcattgccctccagcctgggcaacaagagcgaaactccagctcaaaaaaaaaaaaaaaagaaagaaagaaagaaaaaaatagtaatagtcaaaatgtcataagatgttttcttttctaaactaaaagtagtccaagatgagccaattaagaggattatcatggaaagtaaaataagccaggcacagtggctcatgcctataatcccagcactttgggaggccaaggcaggaggactgcttgaacccaggagtttgagaccagcctgggcaacagtgggaaactctgtctttacgaaaaatacaaaaattagccaggcatggtggctcacgcctgtaatcccagcactttggaaggccaagacaggtggatcacctgtggtcaggagttcgagacccacctgaccaacatggagaaaccccgtctctgctaaaaatacataattagccaggcatggtggcacatgcctgtaatcccagctactcgtaaggctgaggcaggagaatcgcttgaacctgggaggtgaaggttgcggtgagccgagatcacgccattgcactctagcctgggcaacgagagctaaattccatctcaataaaaaagaaagaaagaaagaaaaatgcaacaattagccaggcacggtggcacacgcctatagtaccagctactcaggaggctgaagtgggaggatcacctgagcccaggaggcaggggttgcagtgagccgagatcatgccactgcatgccagcctgggtgaaaaagtgagactctgtctcaaaataataaagaaaaagaaaaaaaaaaagaacgtaaaatatttcttcaaagcaattttcatgatactaggattaattcctataaccaatgcctgggctgcatggcgcaaacttgggccaccctgcacctcatcccctttcccctccttgatggaatttggaggtgactggttaaaaactcaaactgatggagttgaagagggaaggaagaggagggtattccaggcacaggacggtctcccagccccagcatcggggcatggtctctcctgtgttctccactgaagcacctcttccacttcccacttgaaacccccactgacccaaaggccccgcaggcagggcttgtggcatctctggcacccagcacagtgccaggcacaggtgggcttatgaggatctgcaaatgggagaggagtccagatacccaggaatgtggctgggggacacacaagcaaagactctggttattcaaatatttaaggggagtgaattgacatctttgatttcctttgaaattgcattacaaataagacagactgataatagccattactttcgttctcttttttttttttttttgagacacagtttcactgctgcccaggctggagtgcagtggcacaatctcagctcactgcatcctctgcctcctgggttcaagcgactctctcgtgcctcagcctctcgagtaactaggattacaggcatatgccactatgcccagctaatttttttttttttttttgaaatgggatctcactctgtcgcccaggctggagggcagtggcgtgatctcggctccctgcaacctccacctccaccttccaggttcgaacgactcacctgcctcagcctcccaagtaactgggattacaggtgtgcaccaccacgtccagctaatttctgtacatttagtagagacaggggttttaccattttagccaggctggtcttcaactcctgagctcaagtgatccgcctgcttcagcctcccaaagtgctgggattacaggcgtgagccactgtgcccggcctttagccattactttcaatggaaaaactgcaattaccttcaaaccaacctaacagacacaagaatgcgcagatggacaaatatgtcaggaagcaatgctggcagtatgttcttggaagaattgagtacacaggagtttgctataaaattcttaaaattttttgaaaagtttggaaattttcataataaaatgttagagaaaaaactttagctattcttctaaagacataacctaaactggttatatgatttaagaaaaaaatacactattaataaaagaggatataagttttaaatttcaaagcatgtccactacagaccctctttgacttggcctcttgggaaaggccctcctgggtttccaacctgccttgtccaagacccaggaggagcttcagaagccatcaaaggcaacaacaaaaatatggcaggaataaacatataaattatgcatgtagctggctgagaagggcctcagggtcactctgtagatatcaactgactctgcctgttgagcctaaggccattgcaagggatacatattttctctatctccattttttttcttttttttggagacagggtctcattctgttgcccagcctggagtgcagttgtatgatcacaactcactgcagcctccagttcctgggctcaagcgatcctcttgcctcagcctcccaagtaactgggactacaggcatgcgccactgcaaatggcctatttccattttaaacactgagtctggtgcccatggctttgagatttaccttgaggacgactgcaaagtcgacgtctttcgtttccttcaggccaagaggaatcaggggaatcgtaaatgcctccctatgaggaacacaacaaggtatgtatgaacacccccaaccggacccctgtgcaccccacggccttgccctcagcagcccaagctcaggtgtgtgccccctccttaccccatcctgtactcacctggctgacaggctcattttccataaggatgactctggtcatgccccaccctctgctctaaaactgaccccgctccctaagactgctggaccacccctcctaacacatcaggcccctggcatcttgacactgatttatcttccagtttcaatgcctcaatggttccttttttattttattattattttttttagagactcttgttctgtcgcccaggctggagtgcaatggcgcaatctcagctcactgtagcctctgcctctcgggttcaagcaattctcctgcctcagccccccgagtaactgggattacaggcacacgacaccacacccagctaatttttgtatatttttttagtagcaatggggtttcgccatgttgaccacgttggctaggctggtcttctgacctcaagcgatccgcccaccttggcctcccaatgtgctgggatgacgggcgtgagcctctgagcccagctcagtctcaatgcttctttcggcagctgtgctgagagtctattgtgtgccagggtctgtgcctggtgcacttgctgctcccacctgggtgcaccaccctgctgcctcctttgtcagctcctcacccccacctcctctgcccccctcagcgggccccacagctgtggaagctctccaataccctcacatttgcaactctgggttcataggggcctcttctttgggaagtgtctaggcgtcccaccaccggcacaggagatgccgtcagggcagaagccccatctgacaccgaaatgcacctgcctcccagcccagggtcagacaccctccacctcctctcccccagctgaccactccgtaaccacaggtcgcctggggagtgctccctgagcctacattcctaggggcagggccagaaggaagtgaatgaagctcaggctgtgttttgcaaacaaggatttagctccctgacctgtaacaggagacctccttgggctgctcagcccagccccacaagaaggccaggaaggctgggcagggcgaggggacaatgcagctgtaagctgaacctggctctgcagtgcagctgtgctacagccaggtgagtcccatccgggggcatggaaagccggatcctgctgaaggctcctccaggctactcagggcaggaagccaggtttgcagctgtccaggcaatgagaagaggaggagcgagtgtcctgagtcccagctccagggtaccccagccccaatgtggcaatgacagcgccctctaggtgccttctggcctccctgagttttcccatctgcaccatgaggttatttctttcccacctacctcctagaagactgtaaagatcaaccatgctaagaaagaaacagtctactttgaaaacacagtagtgcaggccaggtgcagtggctcacgcccataatcccatcactttaggaggctgaaatgggtagatcacctgaggtcaggagttcaagaccagcctggccaacatggtaaaaccccgtctctactaaaaatacaaaaactacctgggcatggtgatgtgtgcctgtaatcccagctactcaggaggctgaggcaggagaatcacttcaaccaggaggtggaggtagcagtgagccaagatcacgccactgcactccaggcctgggcaaaagagcgagactccatctcaggaaaaaaaaaaaaaaagaaaaaaaaaagatcaaccatgctaagaaagaaacaatctactttgaaaacagggccaggcatggtggctcacacctgtaatcccagctctttgggaggccgaggcaggcggatcacgaggtcaggagatcgagaccatcctggctaacggtgaaaccccgtctctactaaaaatacaaaaaattagccaggcaaggtggcgggcgcctttagtcccagctactcgggaggctgaggcaggagaatggtgtgaacccgggaggcagagcttgcagtgagccgagatcgtgccactgcactccagcctgggcgacacagtgagactccatctcaaaaaaaaaaaaaaagaaaaaaaagaaaacagaagagcgcaggacccaaatgcatggtgccgtgttgaatctgcacagctctccctcttcccaatgacacagggcagtgactggccactctagagcccagggaccaatccagagaccttcggttcactctgtgggaagccctgtgttgcacgtccctgctcttcggcatggcaaatgcgagtgtggaacagccgacatttattcccaaaccttggccccatctcgcctcctccagaacctgaaccttttggacaaacactggaattgaacaccagagcataggctgggagaaccttccattagctgtcgcactgactgggcgttcaaaactgcacaggaggccgggtgtggtggctcatgactaatcccagcactttgggaggctgaggtgggtggatcacgaggtcaggagttcgagaccagcctggccaacatggtgaaaccccgtctctactaaaaatacaaaaaattagctgggcatggtggcatgcgcctgtagtcccagctactcaggaggctgaggcaggaggattgcttgaacctgggaggcggaggttgcggtgagccgagatcatgccactacactccagcctgggtgacagagagagactccatctcaaaaaaagataaaacaaacaaacaataaaaaccgtacaggagcccacaggtaagccaggcatgtggtgtcacaaagggaagagccagcgaggtttcacacactgacgcctcccctccagctctgaaaccaccccggtgccctgcagaggaccagcaccaggaaacacacattccataggtgactcaaggttcccaaatcccgggagctattttccgactgagtttcccctggggcccacctactttttgagaagtctcatgcccacactgaagaagcacgtaaacccttctctgaactgtctcaaagttatttctccttaaaaagaagcatttcgcttagggttctgttttgtttttgtgttttttgagacaggacttttttctgttgccattactacagtctcgacctccctggctcaagtgatcttcccacctcagccttctgagtagctgagactacaggtgtgcaccaccatgcccggctaattttcctattttttgtagagatggggtttcactatgttgcccaggctggccttgaactcctgggctcaagcgatcccccacctcagcctcctgaagagccgggattacaggcataaggcaagaggggcatttctttcatagttagatctccatttttggagatgtattgcaattctgagggatggtgttgttggctttcacgttgaagaaatcgattccaaaattgagttatggagaatgatacaatagagtgccttcaaaattgacctaggggccaggcacagtggctcacatctgtaatcccagcactttgggaggccaaggcgggcagattacttgagaccaggagttcaagaccaacctgggcaacatgatgaaaccctgtctctacttaaaaaaaaaaaaaaaaaacaattagccaagtgtgatggtgcgtgcctgtaatcccagctactcaggtggctgaggcacaagaatcgcttgaacccaggaggtggagattgcagtgagctgagatcgctccactgcactccaacctgggtaagagagggagactctgtgtcaaaaaaaaaaaaggaaatacaaccttaaaaggagactggtgtgttactttaatttggatttttctgtttcagtttgtccctccagctaggaaacagactgcagtccaacgtaagtacagtgcacagaatctctgtgtgtgcatagtggcctccccttacagggtcaattttggcctttggccttaatcccaaagtatttgtgtatgctttttgttccttggcaaataaatgaggaaataattagccaacattggaaaggtattgtcctaacaatgtccctttaatatttcttaggaaagttatggtgacccactaaaatatccttgcttaatgtctgttcagttgaatttaataacatatcttgctaatgtttgcgtgtctatgaaatgtgactacgcggaattactgaaaattaactataaaatccaaggcatctaacttttaaacttatcttggctcatcacgtatatttacactagattttatactgtgttcatttgtttttttttttttttgtctgtttgttttgagacagagtcttgctctgtcagccgggctggagtacagtagtgtgatctcggctcactgaaacgtccaactcccgggttcaagcaattctgcctcagcctctgagaagccaggattacaagtgtgcaccaccacgcctggctatttttttttttatttttagcagagacggggtttcaccatgttggccagactgacctcaggtgatccacccgcctcagcctcccaaagtgttgggattacgggagtgagccaccgtgcccggcctcacaaatgcctttttgtccaacactgcaggtatttcccaacaaatgggctcatcccttccagtctagcacctcactcaaccccaaacctgatggttctctcacttccgaaagtgggggctgccacaccccagtctagaacgctatctgacctctttgtgcagcaccctggatgtacgaaggatctctggctcagaggcttttggaaggtgtgctgctcccacttactctgtgttctgatagacgcccaccgagatgttcagcccctccagctcttccttgagcatctgcaggtctgagttgacgaagctcagctccagccgcacttgctcccgcacctttgagtttgtggccactctgttcaaagagaagagggagagaagtgccctcagccaggtatcctggcttctaggtgagcagacccaatccccagtccctgcagggaggatcagggcacagcttgcagaggagggccaggagtgtcggttaaggtatcccagggacacagggcacctacccagcttgcagcacacctgccagtacgtggagctggggacacaggcaatgacactgtgagctgcagacatgaactctatgacatcctgcaaacactcagtcttgagaagagaaaacaaaactgctcccagccatgccctaaaataccataagatacccacttgaaaagaaatgaatgattccagccgggcatggtggcttacgtctgtaatcccagcactctgggaggccgaggcaggtggatcagctgaggtcaggagttcgagaccagcctggccaacatatagtgaaactctgtctctactaaaaaatacaaaaactagctgggtgtggtggtgcatgcctgtagtcccagctatgcagaaggctgaggcttgaacctgggagataggggttgcagtgagctgagattatgccactgcactccagcctggacaacagagcaaggctccctctcaaaaaaaaaaaaaaaaaaaaaaagaaatgaatgattcctttcggtgggagaaatcacagtacataaataaataaacataaaatttgttttaaaaaaagaaagaaatggatgattatagctgggcatggtggtgcatgcctatagtcccaggcaggaggattgcttgagtccaggaggttgatactgcagtgagctatgatcacaccaccgcaatccagcctgggtgacagagcaagacactgtctctaaaagctaaaataagataaaatgaaataaaatataaaaatatataagatagaaagtaaaataaaataaatgaatgagaaaatgaagggagaggtaatgcttcccaattcattctgtaagactagtattagcaatccaagcctagcaacatataaataggattgtacaccataactaagtgggatttatcccaggaatgcaaggttggtttaacatctgaacatcaatataatataatatattaacagaataaaggacaaaaaaacacatggtgacttcaacagatattgaaaacactgtgacaaaatccatcacagattcataataaaaattctcaacaaagtaggaataaaagagaatttatgaaatctgataaaagacacctacaaaaacccacagttaacatcacacttagtggtgaatgactgctttcctcttctcaccaggaacaaggcaaagatgcccacttttgctatttctaatcaatgaggcaaataaagaaattaaaggcatccagattagaaaggaagaaataaaactgtctttatttacagatggcactatcttatatatagaaaatcctaaggcatccataaaacaaatattagtactaataaatttagcaaggtcacagggcataatcaatatacaaaaatcaattctttttttttttttttctctagacagggtatcagtctgtcacctaggctggagtgcaatgtcaccattatggcttactacagcctcaacctcccaggctgaagccatcctccagcctcagcctcccaaggagctgggactacaagtgcacaccaccacgctggctaatttttgtgtttctttgtagagatggagtctcactatgttgcccaggctggcccagaaatcctgggctcaagcaatcttcctgcctcagcctccgaaagtgctgagattacaggcatgagccactgtgcctggccaattctatttctatatactagcaatgaacaatcttaaaattgagaaaaccattccattcacaatagcatcaaaaagaataaaatactcaggaataaacaaaagaatcacaagacatgtaaactgaaaactacaaaacaatgctgagatatattaaaagaagagctattctatgtttatggatgggaaggctcattattgtcaagatatcaagcctccttagttggtacattcattcaatgcaacctcaatcaaaatcccactaacctttttaatagaaatcggcaagctgatcctaaaattcatatggaaatgcaaaaaaaacctacaataggcaaaataattttgaaaaataagaacagagttggaagacaattgattttaaaatttactaaaaagctgggctgggcatggtggctcacgtctgtaatcctagcattttgggaggttgaggtgggtagatcacctgaggtcaggagttcaagaccagcctggtcaacacggtgaaaccccatctctactaaaaatacaaaaaattagctgggagtggtggcggacacctataatcccagctactcgggagcctgatgcaggagaatcacttgaacccggaaggcagaggttgcagtgagccaagatcgcgccaccgcactccagcctgggcaacaagagcaaaactccatccccaaaaaaaaaattaaaaataaacttactaagaagccatagtcatcaagatagcatggtactgacataaagataggcaatgaatcagaataaaagtccaggaataggccgggtgtggtagctcacgcctgtaatcccagcactttgggaggccgagacggacggatcacgaggtcaggagatcgagaccatcctggctgacatagtgaaaccctgtctctactaaaaatgcaaaaaattagctgggcatggtggtgggcacctgtagtcccagctactcggggggctgaggcaggagaatggcgtgaacccaggaggcggagcttgcagtgagctgagatagcaccactgcactccagcctgggcgacagagcgagactctatctcagaaaaaaaaaaaaaaaaaagaagaagagtccaggaataaatgtttacatttatgtagtaaatctttacaattgattttgaacaaaagtgccaaatcaattcaatgtggaaaagattattgtttcaacaaatagcgctaaagcaggttgacatccataggtacgtcagggtccctaaaaccacccccaagttcagtgttaatctaggaggacttgcaaaagccatggctatggtttacgacagcaaaagacacaaagcataatgagcaaagggaaaggcacatggggtgaaattgggaggaggcccggcccaggcttctaggggtcctctcccagtggaatcccacagaccgtgcttaactcccccagcaaagagttgtgacaacacacgtaaaatgccatctaccagggaagctcagagactccgtgtccagggtttttactgggggctgatagcataggcacctctgcctagcatgctccaaaattctggattcccagaaggaaggcaagtggttccacataaaccacaccatttgtacaaacagttcaggcacagtgagtcaatcttatcagtctgggaatggtgagaacactcgtaaaatcgaagtctctgccctcaccacgtgtgacaacactcttcctcttgtggccctggaagtccacacacacgcacatttggactgccccagaaaataagatactggaggctcagcttgatgaatttcatcaatttagagatgtttgtgtgtgtatggctatggcaccagtaagaaatacattttaagccaggtgcagtggctcacatctgtaatcccagcactttgggaggccgaggcacgcggatcacttgaggccaagaattcgagatcagtctgggccacatggtaaaaccccgtctctattaaaaagacaaaaattagccaggcatagtggcacacgcctgtagtcccagctactcaggaggctgaggtatgagaatcgcttgaacccgggaggtggaggttgcagtgagctgagagcgcaccactgcacaccagcctgggtgacagagcaagactccatcacaaaaaaaagaaaaaagaaatacattttattttacaactcagtacatgcatgcacacacacagacacatgcccctgcaacaaaagtctcacagaagtcataggcgtgatccactccagcatagtctagtctactctaataacttctttttaaaacacaattatgtttgcaaccctccaattctctgattatctgacaccaactgggtatccaacaattcaattcgattctgaccccagctcccggcgtaagcacataccccacagagtaggggctcggtcccacaaggctgcccccattttagggaccagtcacacatcctgggagagagggggatacttgtgcttctgactgatgagctgtcaatcaaaggttcccactgccacctcctcaggtttggtaattcaccagaaagactcccagaacataggaaagcacctgatggaccagtactggtttatgttattcaattcaggaacagccaattggaagaggtgtacacggcaagttatggtgggagaggggcagggcttccatgctcactccagacacctcaatgtgttcaccaacccagaagctccctgaacctcatcgttcagaattttattctattctattctttctattctattctattctattctattctattctattctattctactctattctattctattatttttgggagagggtcttgttttgtcacccaggctggagtgcagtggcacatcatggcttactgcagccttgccctccagggctcaaatgatcctcccacctcagactcccaagtagctgggactacaggcatgcaccaccacacccggctaatttttgtattttttcaccatgttgcccagtccagtctccaactcctgggctcaagcaatccgcctgcctcaggcttccaaagtgctgggattacaggcgtgagccacgacgcccagccttattttatttttttgtatagatggtgtcttgctatattcccgaggctggtctccaactcctgggctcctgggcttgagtgatcctccctcaccctcctgagtagctggaactacagatatgcaccattgcgcctggctaacgtaggttttttgtgggtgtgtgtgagatggagtcgcccaggctggagtgcagtggcgtgatcttggctcactgcatgctctgcctcacgggttccagtgattctcctgcctcagcctcccgagtagctgggacagtgattctcctgcctcagcctcctgagtagctgggactacaggcgcccgccaccacgcccggctaatttattggatttttagtagagaggggtttcaccatgttagccaggatggtcttgatctcctgacctcgtgatccacctgtctcagcctcccaaagtgctgggattacaggcgtgagccaccgggccggtcttttttttttttttttttttttgaggcagagtctcactctttcccccgggctggaatgcagtggtgcgatctcagctcactgcaacctccacctcccaggttcaagcaattctcctgcctcaggctcccgagtagctgggattacaggagcctgtcaccatacccagctaatttttgtatttttagtagagacggggtttcaccatgttggcctggtctccacctcctgacctcaggtgatccacccacctcggcctcccgaagtgctgggattataggcgtgagccaccgtgaccagcctaatgcagggtttatggaggcttcattacgtatagatgattaaatcattggccactggtgactgagctcgatctccagcctctctcccttctccagaggtggtgtagggaggagctgaaatttccagccctctcaccatggcttgtgctttctggggatcagcatccattctaaagcctcccaccaagagtgatctcattagcatacaaaagatacttttatcactcaggagctctgtgccaggaacacaggaacaggacaaagaccaaatatttatcttttattatgccacagcaaagcactgaattgatgtcattacacaccacaggtcacaatctgcagcttgtaaaacctgtgctacaaagagcttattgagaaaacgactgatcctgtagctgataatgttcacaaggattggggtgggggcggaatcctcccatccctcagtatcaggaatgggttcatttcttcttacaaatgggattccttttgtctagtgaatataaaatgtgttccaaatatattcccttcctcctattgcctgccaggaagctcagagacaaaccatggctcacatttcacaaagtatagaggactttgtggcatgcactagccttacctccagctaaatctctcctttattcttctttctcttgccttcatatcttcattcactcctgatttaatcttacatgttgtatgaatatgttaaggtacttcaaatctactttaaaatgagggaagataaataattataattcaattataattcctagaggacaagccttctttctcttggtatttttttcctagaatctggcatagccctttccacatcatgggggcgctgaacaaattttagttcatggaagaacaaatgacagagtgaagactactccctctaggcagtgagggagctgattggtgcttagtaccacagtaggttcgacttaaatataaaaactaaggctgggcacagaggttcacacctgtaatcccagcactctgggaggccaaggtggacaggtcaactgaggtcaggaattcaagatcagcccggccaacatggtgaaaccccatctctactaaaaatacaaaaattatctgggcatgggggcacacgcctgtactctcagctactcgggaggctgaggcaggagaatcacttgaacctgggaagcgaagattgcagtgagcagtgatcacgccactgcactccagcctggcgacagagcgagtctccatctcaaaaaaaataaaaattaaaataggccgggcacagtggctcacacgtataatactagcactttgggaggccgaggtgggcaaatcacctgaggtcaggagttggagaccagcctgaccaacgtggagaaatctcgtctctactgaaaatacaaaattagccgggcatggtggcaggcacttgtaatcccactacttggaaggctgaggcaggagactcgcttgaacccgggaggcacaggttgcggtgagccgagatcgcgccattgcactccagcctgggcaacaagagcgaaactccgtctcaaaaaagaaaaaataaaataaaataaaaataaataaaaactgagaccctaagaaccccaccaaaatccctagagagcttccacgtaatgccaactctttatttttccacctttatatataaatttgccatgtctcccccctcccatcttggcaaaacatttttttttttaatagagtcaggggtctaaacatattgcccaggctggtctcaaactgctaagacaaagcaatcctcttgcctcatcctcccaaagtgctaggattataggtgtgagccatcgcgcccggcctggcaacaatttttgatttaagatttgccacaaggccaggcgcggtggctcacgcctgtaaccccagcactttgggaggccaaggtgggcggatcacgaggtctggagtttgagaccagactggccaacacagtgaaaccccgtctctactaaaaatacaaaagttggccgggcgcggtggctcatgcctataatcccagcactttgggaggccgaggtgggcagatcacgaggtcaggagatcaagaccatcctggctaacacagtgaaaccctgtctctactaaaaatacaaaaaaattagctgtgtgtggtggtgggcgcctatagtcccaactactcgggaggctgaggcagaagaatggcgtgaacctgggaggcagagcttacagtgaacagagatcctgctactgcactccaggctgggtgacagagcgagactccgtctcaaaaaaaaaaaaaaaaaatacaaaagttagctgggcatggtggcacacccctgtagtcccagctactcaggaggctgaggcaggagaatcgcttgaacctgggaggcggaggctgtggtgagccaagatcatcacaccactgcactccagcttgggcaatagagcaagactccatctcaaaaaaaaaaaaaaaaaaaaagatttacaagaaagccaggtgaagtgggtcattcctatgatcctagtgctttgagaggctgaggcaggaggactgcttgaggctaggagttcaagaccagccgaagcaacatagtgagaccctgtctctaaaacaaatatgttttttattttagtttttatttttgagatggagtatttttgagatggagtcttgctctgtcacccacgctggagtgcagtggtacgatcttggctcactgcaacctccaccttcaggttcaagtgattctcctgcctcagcctcccaagtagctggagttacagtgtgtgccaccacacccagctaattttttgtatttttactagagatggggtttcaccctgtaggccaggctagtcttgaactcctgacctcaagtgatccacctgcctctgcctcccaaagtgctgggattacaggcgtgagccaccacacccagccaatttttgtatttttagtaaagacaaggtgtcaccatgttgcccaggctggttttaaactcctggcctcaagtgattcttgaggatcagcctcccaaagtgctgggattacaggcttgagccaccacacctggcctaaaaattttttttaaatacatttccaacaaatcaatgagctgcccttaagatgtagacctctttaggttggtcactttgaaactgttggcagccaggtggggtctcagggttggtttctgtaatgctgacctttggtgcaaccatgattcagaaatcaaccctggcgtctgagcttcgttgctagcacaggtgtaggtcagaggcgttcgaaggacagcgactccattttgagtgagggctggaaaaagaggctgagacttgctgggctgcattctcagaaaattagccattcctagcctctaaatgtttacagtaaagggaacaaattaataatgttttctaaaacagacccagacctgggagtgtccagatatcccgatatctggagaacaaaggcattcctcaattttgctttaaagataataatatcgggccgggcgccatggctcacgcctataatcccagcactttgggaggccgaggtgggcagaccaccaggtcaggagatatagaccatcctggctaacacggtgaaaacctatctctactaaaaatacaaaaaaattagctgtgtgtggtggtgggcacctgtagtcccagctactcggcaagctgaggcaggagaatggcatgaacccgggaggcagagcttgcagtgagcagagatcaggccactgcactccagcctgggtgaaagagccagactccatctcaaaaaaaaaaaaattaaaaaaaaagataataatatcgattcctgcaaaatatagtaagaaagaaaattaatttttttttttttttttggtgacgggagtcttgctgtgttgcccaggctggagtgcagtggcacaatcttgggaggctgaggcaggaggattacttgaggccaggagttcaacaccagcctgggcaatatagggagacccccatctctacagaaaatttgaaaatgaaaattagctgggaatggtggtatacgtgtatagtcccagctgcttaggaggctaaggcaggaggatcacttgagcccaggagtttgggtctgcagtgggctagtgagaggtgacagcgtgctggcagtcctcacagccctcgcttgctcttgatgcctcctctgcctgggctcccactttggcgacacttgaggagcccttcagcccgccgctgcactgtgggagcccctttctgggctggccaaggcccgagccggctccctcagcttctggggaagtgtggagggagaggcgcgggcgggaaccagggctgcccgcggtgcttgcgggctagcgcgagttccaggtgggcgtgggctggacgggccccgcactaggagccgacgtccggcccgctggccccgggcagtgaggggcttagcacctgggccagcagctgctgtgctcaatttctcgcctggccttagctgccttcccgtggggcagggctcagcacctgtagcccgccatgcctgagcccccccgccaccctctgtgggctcctgtgtagcccgagcctccccgacgagcgccgccccctgctccacggcacccagtcctatcgaccgaccacccaagggctgacgagtgcgggcgcagggcgccggactggcaggcagctccacctgcggccctggtgtgggatccactgggtgaagccagctgggctcctgagtctggtggggacgtggagaacctttatgtctagctaagggattgtaaatacaccgatcggcactctgtatctagctcaaggtttgtaaacacaccaatcagcaccctgtgtctagctcagggtttgtgaatgcaccaatcaacactgtatctagctactctggtggtgacttggagaacctttgtgttgacaatctgtatctagctcatctggtggggacatggagaacctttgtgtctagctcagggactgtaaatgcaccaatcagcaccctgtcaaaacagaccactgggctctaccaatcagcaggatgtgggtggggccagttaagagaataaaagcaggctgcctgagccagcagtagcaacctgctctggtccctttccacactgtggaagctttgttctttcactctttgcaataaatcttgctgctgctcactctttgggtccacactgcctttatgagctgtaacactcactgcgaaggtctgcagcttcactcctgaagccagcgagaccacaaacccaccgggaggaaggaacaactccagacgaacaactccagacgtgccgccttaagagctgtaacactcaccgcagaggtctgcagcttcgctcctgagccagcgagaccacaaacccaccagaaggaagaaactccaaacacatccgaacatcagagggaacaaactccagacacgctgcatttaagcactgtaacaccgcgagggtccgtcgcttcattcttgaagtcagtgagaccaagaacccaccaattccggacacactaggattgcactgctacactcagtgtgggcaacagagtgagacctcctctcaaaaaataaataaataggcatggtggctcacagctgtcatcgcagcactctgggaggcctaggcacgaggattgcttgagccctggagtttgagaccagcctgagcatcatagggagacccagtctctacaaaaaaatttttaaaattagccgaatgccagtcaggtgtggtggctcatgtctgtaatcccagcacttttggaggccgagtgggcggatcacttgaggtcaggagtttgagaacagcctggacaacatggtgaaccccctctctattaaaaatacaaaaattagctgggcatgggggtgcgtgcctgtaatctcagctactagggaggctgaggcaggagaatcgcttgaacccaggaggcaacagagcgagactccatctcaaaaaaaaaaaaaaattagcctactatggtggtacacacctgtggaggctgaggcgggaggacagcttgagcccagaaggttgaggctgcagtgagctgtgatcataccactgaactccaggttgggcaacacagcaagacccagcctcaaaatgaataaatataaaaattttatttatttattatttatgtatttatttattttgagacggagtctcgctctgtcacccaggctggagtgcaatggcatgattgcagctcattacaacctccgtccccctggttcaagcaattctcctgcctcagcctcccaagtagctgggattacaggcgcacaccaccacacccagctaattttcttttctttttgttaagagacagggtctcactctgtcacccaggctggagtgcaatggcgcgatctcggctcactgcaacctcgaactcctgggctcaggggattctccagcctcagcctcccgagtagctgggattacagatgtgtgccaccacgcgtggctaatttttgtatttttagtagagacaaggtttaaccatgttggccaggctggcctcaaactcctgacctcaaatgatttgcccgcttcagcctcccaaagtgctgtgattacagacttgagccaccacgcctggtctaaaaagttttttttttaaagtaatacatgtgtatgttgcattctgtccccatttgttttagtgtaattatttttctcccaagtcttttaataaaactatccttccaggaataagcaccacattgacatagtgacttgccgcagcttcagcgaccttattagagcagcttagccttagtccatctgatcccaaatcccgctctgccagggtttcaggaggctggagcgaggactgtcccatcccctgctgaggtggctgatcagccagaccggcaggacatctgctcccagcctgtctctcaatggaggaaggtgggccttgatgttgatgtcagccccaaaggctatggagggcctgcaaaccccaccacagacacacaccagccctcccacaactgacggtgtgagctgtcatcaacctcaagtcactctcatgacagccaaggccacctcacgtcactcctgacccagaatttcatcacccccgtccagaggtcacaaactaaactgaaggcccgagggacttgttcacctggctctcaggatgttactatcccccctctgaaacgagtccccaaaacttaaaaattcaacaatcggccaggcacagtgggtcatgcctgtaatcccagcactttgggaggctgaggcagacagatcacttgaggtcaggagtttgagatcagcttggccaacatggcaaaacctcgtctctactaaaaatacaaaaattagccgggtatgatggcgcatgcttgtagtcccagctactcaggaggctgaggcaggagaatcacatgaacctgggaggcagaggttgcagtgagctaagatcacgccactgcactccagcctgggtgacagagcaagactctgtctcaaaaagaaaaaaaaaaaaaattcaacaatcagattaaaaacaaaaaaaaattcctaacttctcctggaaaaaaaaaaaattagaagatacagcaactctggccctaccctccatgaggcaaactgcagttgcctcatccagacagggcatatgctgtgcacttcaccacagtccccaccactccctgttgtctcacagcacagaatccagccccattcactcatttaaagcccacctgatccctgtaaacctcggagcaggtcacttctgatctagcccaacaactctcagcacaacaggggaacctgaagcccagagaggttaaatgacctgctcttgttcaaagaatcaaagaactagttagctaaaactagttaaaactaggcaacctgcctttttttttttttttttttttttgagacggagtcttgctctgtggccctggctggagtgcagtagcgcgatctcagctcactgcaagcactgcctcccaggttcacgccattctcctgcctcagcctcccgagtagctgggattacgggcacgtgccaccacacccggctaatttttttatttttagttttagagatggggtttcaccatgttggccaggatggtctcgatctcttgaccttgtgattcgcccacctcggcctcccaaaatgctggaattacagaagtgagccacagtgctcaccggccctgctttaaatttcacaaggactgcctcaatttcagataaacttcatcatatttctaccctagcttttctcaagggagggaagctgggagaagacagaatattgtctctggttggcctaaatgaaaaagtacggtcaggcatggtggcttacacctgtaattccagcactttgggaggctgaggcaggcagatcacctgaggtcaggagttccagaccagcctggccaacaccgtgaaaccctgtcttactaaaagtataaaatttagccaggcatggtggcacatgcctataatcccagctactcgggaggctgaggcacaagaatcacttgaatccaggaggtggaggttgcgcaggtgagctggtatctcgacactgcactccatcctgggagacagaatgagactctgtctcaaaaaaaacaaacaaacctgaaaaaagtgcatttgaaatatttgatggcttcctaaaaaaactccaggaagctcatggactcccagctggaatggatcagagaaggggaagactttgaaggatcataaaatctggtttttcaagtgcctgcctagccacgataccctctgacagtcctcagataagggcttagcacccccatttccattcctgcatttctggggacacctccaaacatcccccacccctattccaacagatctactttcctttgggggctgcggtaggaaacctgggaaccagaagacaaacagaaggaaagcagggcctaatttacaactgaaaccacccatggcctgcagagacagccacgtaatgggtcgcccagggacactgaggggccagagcggagcttggcaaaatgccctatttgttttcgggaaaccgttggtgcttgttgagtcagattaataaataccttcagggtttcctctgacaacattctccagcaaggggtactttgaacctttaggccactgtgagaatcattaacaaccccccactcctgcccctgccaacccaaccactgccagtttaacaatgagcttgagtcaggctcgggcctcagaaagggtgactgctgttgtcgttaagagaacaaggcacacaaaactgccctagttcctgcctgagaaagtccaagttccctgctcacaggggcctctctgaccaccctctgtctctaaggctggccatcctgggccaacctctatgatattcagagttcattattccctagaaaacatcacttccctaggtgatctgatttgtttacttgtctataaaagtctcctcccatcctccaacaagagaaatcacaaaagcagagcctcgcctgatcttcaggcacctcaactgtgcctgccacttaacaggtgctcaatagccaggcacaggggctcactcctgaaatcccagcactctgggaggctgaggcaggaggatcacttgaggccaagactttgagacaagcctgtgcaacacggtgaaaccctgtctctactaaaactttaaaaaattcaattagccaggtgtgctggcacgtgcctgtagtcccagctatttgggaggctgaggcaggagaaccacttgaacatgggaggcagaggttgcagtgagccaagattgagccattgcattccagcctgggcaacaagagtgaaactccatctcaaaaaaaaaaaaaaggtgctcaatgaatccatgaataggtaaatcaattgttgtccactcctaggaaagccatacaccatcaaggctgcccacctgcccccttggccacagagcaggcctgtccaagggtcaaccagaaccctaggccacaaaacataccacggccttcccagcacatgacagggagtcccaaaatcgggggcctctctcacgtcacacagatgacatgagttgctctctgctatgggagtggacaattcccatgtccaaacttgtcttgggatagggacactgcttgactttttaaaagccaaaacgctacagtatttttcccagcctcctccagtaacaacctgctttgcacccagttgcaaaaggagctggagaagagattcccagacaaacttcccacccaggacctcaagtcatcaggtattccgtgagtaacaaaagcaacacaggccaggcacagtggctcatgtttgtaatcccagcactctgggagaccaaggcaggaggatcacttgaggacaacagttcgagaacaacctgggcaacacagcaagaccctgtctctacaaataatttttaaaaaatcagtcgggcattggccaggcacagtggctcacgcctgtaatcccagcactttgggaggctgaggcgggtggatcacgaggtcaggagttcgagaccagcctggccaagttggtgaaacctcgtctctactaaaaatacaaaaatgagccgggcacggtggcgggcacctgtaatcccagctactgaggaggctgaggcaggagaatcacttgaacctgggaagcagaagttgcagtgagccaagatcacgccactgcactctagcctgggtgacagagcaagactccgtctcaaaaaaaaaaaaaattagtcgggcatggtggtgcatgcctgtggtcccagctactcagtaggctgttaggaggattgcttgaagagcccaggaggttgggggctacagtgagctgtgattgcacattgcactccagcctgggcaacaagagcgaaactccatctgaaaaaaaagaaaaaaggtggcatgacgccagacgcagtagctcgcgcctgtaattccagcactttgcgaggtggaggcagacggatcacttgaggccaggcgttcaagaccaggctggccaacatggtgaaaccccgtctctactaaaaagacaaaaaattagccaagcatggtggtgcatgcctgtggtcccagctactggggaggctgaggcaggagaatcacttgaacccaggagacacaggttgcagtgagccgagatcacgccactgcactctagcctgggcgacagagcaagactgtctccaaacaaacaaaaaacaaggcggcacggggctaaccatggtctccagtagaactctgaaggaagaagaaactctgcactctttgtaaacagagtgctggcacattgtcttttgttgcatttcgttgcctggagagggtttatagaggtctagacacaggtaaggcttctctgagttctatgctgggtaagtaactgttttaccacgagagcatactaatgagtgccctagatcacgggggtgtactgagccctctcattagcaaggtggacactggcaatagaaatatcccctctccttcctttctgcttttctttcctttatatattcaataaacatttaccaagcaaattctgcaccaggcatagtgtcaggcagtggagaaaatagacaagtcccagagaaagccagaaaacaaacctcgagacaaaaattgggcttcccatcaagatggctgactgaattgaagccaaatgccacaccgtctgcatctatctcccacccacccaatccccaaacacacaaacaggcggggtaaaatatctgttttcaacataaccaagctataggcaagaaagggacgactccagatgccagaaatgaggaggaaacccaaagctgaaaccaagagcctggcctgggagtttagggaacagatgactaggactcaggagaggcagggaagccagaagacacctacttcagaaggttttccgctccggtcctcatccgcacggctttcaggatctgctgattcaaagcagctctttgattctgcaatttactccggccggtttgtgcaaggggattacagccctgaggaaaaataagagatgccccttcagaggtcggccactctaaaaatgatgacagggtttaatataatggaaaatgtttaactttaaaaataatcttttctgaaaacaaagcatctacatagaaaatattgaaaagtataaagaaaagtcgctcataacaacacaattgcaaaacagccactgtgaattggtctttccttctcatctattttatttatgtaatttattttagagacaaggtctgagctaggcactgtggctcatgcctgtaatcccagaactttggaaggccaaggcgggtggatcacctgaagtcaggagttcaagaccagcctggccaacatggtgaaaccctgtttctactaaaaatacaaaaaattaaccaggtgtggtggtgggcgcctataatcccagctactcaggaggctgaggcacgagaatcgcttgaacctgggtgctgaaggttgcagtgagccgagattatgccactgcactccagcctcggcaaccaaagtgagacgctgtctcaaaaataaataaattaattaaagacatatctctagggcagagttataagatcaaacctttcagggctacccatgggccagcccaatcatcctccaggacagaaaggcacccacacccttgtgaccgctttccccctcactgttactgagtatctactttttttttttttttttttggagatggagtctcgctgcgtgcctaggatgcagtgcagtggcgcgatctcggctcactgcaatctccgactcctgggttcaagtgattctcatgcctcagctttccaagtagctgggactacaggtgcatgtcaccatgtccaggtaatttttgtatttttagtagacacagggtttcgccatgttgcccaggctcgtcttgaactcttgacttcaagtgatccacctgccttggcctccccaaagggctgggatggcaggtgtgagccactgcgcctggcctactttttttatttagtaacagctttatggagatataatccatataccatacgttttgcccttttaaaataaacaattcattggtttttagtatattcaggagttacagaaccatcagtgctatctgattttttttttttagatggagtcttgctgtgtcatccaggctgcagtgcagtggcacaatctcggctcactgcaacctctgcctcccaggttcaagtgattctcctgcctcagcctcccgagtagctggaattacaggtgcccaccaccacgcctggctaatttttgtatttttagtagagacagggtttcgccatgttggccaggctggtcctgaactcctaacctcaagtgatctgcctacctcagccccccaaagtgctgggattacaggcgcgagccaccacgcccatcaaccactatctgattttagaacattttcatcagcctaaaaaaaaagcaagtagccattagcatcgctcctcatttccttttccccttaaccccagccctaggcaaccaccaatctactttctgtctttacaggtttgcttattcaagattatttcatataaacggaatcatataatatgtggcctttgcatctggcttctttcatttgccatgatgttctcaaggtttatccaggttgtagcatgtatcagaactttgtccgtttttgtccctgaataagatttcattacatagatacaccacacttgtgtactttatccattcatcattcatcatacaatgggcatggggagtgttttcactttttgactattacgaataaggctgtttatgtgcgtacaaggttttatatggatatgtgcttttgtttctcttggctataaatatagaaataaaatgtctagatcaggtggtttttttgttttgtttttatttttgattctgtttttttgagacagaggcttgttctgtcgtccaggcttgagtgcagtggctcgatctcggctcattgcaacctctgtctcccaggttcgaacgattctcctgcttcagcctcccgggtagctgggattacaggcgtgcaccaccatgaccagataatttttgtatttttagtagagaggcgggtttcatgatgttggccagggtgatctcaaactcctgacctcaagtgatccgcttggcttggcttcccaatatgctgggattacaggcgtgagccactgagcccggtctagatcatatgatttattctatgtttaatgatttgaggaactatcaggctcttcaaagtggttatacaattttacaacccaactaacaggatgagagttccaattcatctacatctcaccaatacaggtgctggtctatcttttttattacagctaccttatgtgtgtgctgtctcacatcgtggttttgaattgtgtctccctgacagttaatgatgttgaatatcttttcatgaacttattggccaactgtatatcttcttcgaagaaatatcaattcagatcctttgcccattttttttttttgaaacagggtctcagtctgtcacccagactggactgctgcagtggtatgatcttggctcactgcaaccttcacctcctgggttcaagtgattctcctgcctcagcctcctgagcagctgggactacaggtgcatgccaccacgtccggctaattgttccattttttggtagagacaaggtttcaccatttttttgccaggctggtcttgaattcctgacctcaagtgatctgcccatcttggcctcccaaagtgctagtcttacaggtgtgagccaccacacccagctctcctttgcccagttttaaactggattgtctttttatctgtctggttgaaaattatttttaatttctgtcaagttgacatgcaaaaatagatagctcattcttctaatttgtatgtttattataacagtgaaggtaaaggtttttccatataatcttgacactttaatttctttttcaacaaattgtctgtgttctctgaccattgtgccctggggtatttggattacaacgcttcacgctaaaagtttaagatcagaataaaagctgcattttagctgaatggtgttcttcccaccccagacaggtagaagcctcaggacctgggatacgcccacattcctctttgccgcttatctctaggtcctgcccactgcggttactccctgggagcggtctggcgggtagtattacgtggtgaagagactgccctttctctctccctgagtcacatctcaggcctgcacacacctggcctctccgacctctgcccaagccacacccatggcctggaccccagggagggagatgtgagttatctatagcggaaacctcctcaggaatcccagtattctccttccacagagatttctcattcttggccagaatggtcatggtagctcacaactgtaatcccaagcactttgagaggctgaggccagaggatcgcttgaggccaggagtttgaggctgcggtgagctacaattgcgccactgcactccagcctggataacagagtgagactctgtctctacaaataataataaaaatttttaaataataataaaaataaaagacttctcattctcatttcccatcaggtcaccaccacccatcccccacatagccccacaacctaattttccctgtctcgcaaggacactttcccccaagttcaaattgcacagatattcggaattcgagttggcttctgtagacaggctggagtgcagtggtacgatctcagctcagtacagcctctgcctcctgggttcaagtgattatcctgcctcagcctgctgagtagctggaattacaggcacccaccaccacacccagctaatctttctatttttagtagagatggggtttcaccgtgttggccaggctggtctcgaactcctgacctcaggtgatccacccgcctcggcctcccaaagtgctgggattacaggcatgagccatggcatccagccctggaatggattttaaaattaatatcgtttaaagcattaaacggtttccaattttgtctttcttcagatttaagattaaaatatctttggccgggcatagtagttcacgcctgtaatcccagcactttgggaggctgaggcgggtagatcacctgaggacaggagttcgagaacagcctggccaacatggtgaaaccctgtctctactaaaaatataaaaattagctgggcgtagtggcatgcgcctataatcccagctactctggaggctgaggcaggagaatcacttgaacccgggaggcagaggttgcagtgagccaagataacaccactgcactccagcctgggtgacacagcgagactcagtctcaaaaaaaaaaaaaaaaaaaactttaatgttaagctattataattaaatattaaataactaaaataactgttcatctctttcctttccacttccaaaaatgacgacgattcagtttgactctgaattacctggatcaccactgctgtgtttcattttacagggaagcttgaataactaattcctttacgtacattcccagagctcagataagcagccattccaaactacggataagaatgtttttttttctgttcgtatactttccccaacttctgctggcctggaatcagtacgccctaaccagcccatagatatgtggtcaggtttctagataaggcataggaacacttagggttagatttgactgagtaattgggcccgaaaccacattacttattcctgacaggtaggaatgttgggctttgctggggaacacaagaaacacccacggggctgtgtgtggaaacttccctgagaggtaaatctggacaagactgtcagaaagactccctggcatcaccagaaactattggccatctactagcccctgccaggggctgctctgtaggggacaaggtggcgggtccaccatccccacccatacatttctcaccccaccccctatcttgtgtaataacgagaccttagccctgaacaaacagcttccagaatagcctctgcaactcagagacagggattggttctcaacagaacacaaagccgctctgagactggagtgagggtttgcaccagggactggggctaaacctctcacacctgtggggccaactgagctgtcctgacctcgggatctgctgttgacaagttctacagtgaagtgagactttctcctccacagagtctattcccttcccacactaaggttcggacatttccgtcagtcccgaaacttgaagagtgggcaaacagccaacacccaagaaaagcaagtactgagtgaacccccgtgtcatcaccagctttacaggcaactcctggggtcggcccgcttatgtggaccctggtacagcatctcggatcccatggttctgcagcaaggaggctatatgagcaacttgagatcctagaggcaggcagtaaaagttggggtgggatttaagaccctgtccttcctgctgctccaggatgagcggtgaggcggtgtgagcggtaggaatgcatgcaacccccagacaccccttcatgggtgatggctgcccaccatcaccccacatcttttgggggaacagtgatgccagcccactctcccgcctcatagcccatgatggcctggtggggggcaggggtgtgtgtgtaaatccatgctcccccaacatcctttccaaagggaagaacatctgacttctgcctggcccattggaaaaccaaagcctgaagatcagggtcaatcgaaacccatcaggaagaggtcctcattggccttgaacctgggaggctgtgacactgagcagttgcagccaccttaccaccagcagaagagtgtctccctagacagggaaccaaccccaggtgggctgagctgagaaacagatttggcgatgtcatctgagccctggatcaagctaggcctgaagccatccctctgtacttttcatttacagcaaccaattcattcccttctttgtatctcaattttctgaattgagatacaatttatatataataaaatacacatattttaagtatatagttcaatgagtttgaacaaacatataaacctgcgtaaccatcactcctatcaaaatacagaacacagaacatttccatcatccccaggcaaccaatactctgatttctatcaccacatatttttgtctgcttttgaactatgtaaatgtaatcagataggatgtagacttttatgtctggtttattttgctcaataccatgttttcagattcacccatgctgtttcatttaccagtagtttgttcctttttttgtttttttagacagagtttcgctcttgttgcccgggctggagcacagtggcgtgaactcggctcactgcaaactccacctcccgggctcaagcgattctcctgcctcagcctcctgagtagctagaattgcaggcacccgccaccacacccggctaatttgtgtgttccttttttattgtgggatagaattctattggaggaacatactagggtgtgtttatctgccaaagttattttggattaaattttctagcacctgcaactaaaaaagtactaactcaaataagtttacctagagtgaaaactcttttctttcctttgagacagagtctcactctgtcacccaagctggagtgcagtggcatgatctcaactcactgcaacctccgcctcctggactcaagcgattctcctgtctcagcctcctgagtagctgggattacaggtgcacaccaccatgcccggctaatttttgtatttttagtagacacagggttttgccatgttggccaggctggtctcaaactcctggacttaagtgatctgcccacctcgccctcccaaagtgctgggactacaggtgcgagccaccgcactggcctagagtgaaaactctctttacaggtcacttacatgcccttaatgtacagtcagattgttcacctgtaagacacgtatttaagagcagcacctagacaaagcccacaggcaggaagactgtacttccagggatcatttctacagttcgttactagagaagtttctctgtacgtgtacagcaaccgtttatattagtgtggcacacacctatctgaaagctttgagtgcagcaatgcggattcaccttgcttgtaactactgttcttaagctcataaaacagctaaataatgtggtgtaacaactaaatgtgtgcccagagaaaagcctcagaatgttatcctaggtgaaatctgttcagtgaacagacagatcacagctacagtgacatttctgccactgttacaagtttcttacaaagtgagaaagtggctgtctaaaatcagacaaaggcctggtgtggtggctcacgtgtataatcatggcactttgggaggctgaggtgggcggatcacttgaggtcagtagtttgagaccagactggccaacatggtgcaaccctgtctcaagcaaaaaatacaaaacttagcccaggcgtggtggcgtgtgtctatagtcccagctactcgggagtcggaggttgcagtgagccgagaacttgccactgccctcctgcctgggtgacagagtgagaccctgtctcaaaaaaaaaaaaaaaaaaagaattaaagtcagaaagagagcccttaccaaaaactgaccgtgctggcaccttgatcttggatttctagcctctagaactgtgaaaaataaatttatgttaagttaaaaaaaaaatataaaactggaggcaggcacttaattaggaagaaaggaaagggtggtcaagctactcctggaacagggcagtttttcttcccctatgggggccctgctccattctgggcagtgcctggcacctgcttcccctccactataggcaatagtatgggcccttcttctgcacagccaaagataaagctcacacatgcagaggtgtttccagcaaatttagggcaatgtgcaagcttgggatctaaaggttcaggcgtaaaactaagtgagagatgacacggtagggctgggccagctcccagccagagagaccttcccacgggatacaggaaggcaggtgtttttagctgcttctccagcaaagattattttctctgcctttctcactccttcctggttacgcaatccctcactcaaccaccaaactctggaaaacagaattgcttgtttataagtcagccagagcaatcaatgagaaagcacagaaaatagcatgcagtacactgcaatacacacatacatctaatttaacttttcaccacactggagattcagggcaggctgggtggaaagaatctagcttgtccatgtccataaaaataaaaacatgaattcagtacttgtcaacagccctcctgcccttccaggatctctgccaggtgtcagggctggaggtgagggcccagccgcctcccccgggaatcccaatccattcacacaggggtggaggggggctcgatatgagtcaacacagccataatctttagttacgagctcccttcagtctcttccagaaatctctataaacccctactgtgtgccaatcacagttatttttcaatatgctgaataacttttttttttttttgagacgaagtcttgctctgttgcccaggctggagtgcagtggtgtgatctcggctcactgcaacctccacctcccgggttcaagcgattctcctgtttcagcctcctgagtagctgggattacaggaatgtgccaacacacctggctaatttttgttttgttttgttttgttttgttttagtagagacgaggtttcaccatgttggccaggctgctctcaaactcctggcctcaagtgatccacccacctcagcctcccaaagtgttaggattacaggtgtgagccactgcgcccagccttgaataactaggcttttactgtgcctcccaccacatcaaatcgtgaacatttccatgaatcaactgtatttccagaccaatgatctgcttatttcaactggtaggacacactcaacaacagttttaacagttttgcttttttttttttttttgagatggagtctcgctctcttgcccaggctggagtgcagtggtgcgatcttggctcactacaacctctgcctcctaggttcaagcgattctcctgcctcagcctccagagtagctgggattacaggcgcacaccaccatgcctggctaatttttgtatttttagtagagatggggtttcaccatgttggtcaggctagtcttgaactcctgacctcgtgatccacctgccttggcctccaaagtgctgggattacaggcgtgagccactgtacctggacacccagctaatttttgtattttttactagagacgtggtttcaccatgttggccaggttggtcttgaactcctaagacctcaggtgatccacctgcctcagcctcccaaagtgctgggattacaggtgtgagccaccgcgcccagtctcttgtttttgagacaggatctcactctcttgcccaggctggactgcagtggcgtgatctccattcactgcagcctcaatatcctggggctcaagcaatcctcccacctcagcctcccgagaagctgggactacaggtccacaccaccacacttggctaattttattgtattttttgtagagacagagttttgtcgatgcagcccaggctggtcttgaactcctgagctcatgtgatctgtccaccgtggcctcctaaagtgctgggatcataggtgtgagccactacatccagccttgtttttttaccacctgcccttttttcttctttgttttttttttttttttttgagacagaatcttgctctgtcacccagcaggccggagtgcagtggcacaatctcagctgactgcaacccccacctccgaggttcaagcgattctcctgcctcagcctcccgagtagctgggattacaggcacgcagcaccacacccgactaattttgcatttttagtaggaacagggtttcaccatgttgtccaggctggtctcgaactcctgacctcaaatgatcctcctgcctcggactcccaaagtgctgggatcacaggtgtgagccactgtgctggtccccttttctcttgttacaatcaaatggaaacctggccatagggaactccgagggtctgaatgggcagccctgagggactcacatcattcaccgtggtgtctccgtccctggtgctccaagtggggaaccttgtcctcacttggcacccattactgctgctctgccagacacccagcctctggctgagcggtacctgcagttcgactgtgtcctatggctacctccaatgcagcctttgtgtcacgggacgctggtacctgagccaaaggaggaagtgttgatcaggctaaagccaacgcccagtagcatcaggtggtgtcgtggcaaccatccaaatggccccaggaaacaagggacatttacagtgttatagttcatcacgttgtctctcctctgagtcaccctgaaaattctgtttctgccaggggatacctcccagccaggatcccacagttgaagactgttggtcaggcagaccctcggggctgatggtggataccatgcagctgggcagaccctcccctctccaaggccacagtcagcctggatccagcctggcctttaagatctggcttagggctgggtgcagtgattcacacctgtaatagcccaccactgagatgggaggattgcttgaggccaggagttgaagaccagcctaggcaacacagtaagaccccatctctacaaaaaataaaaataaaaatcagccaggtgtggcaatttttaatcacatctctagtcccagctagttgggaggctgaggcaggaggatcacttgagcccaggaggtcaaggctacagtgagctacaacggtgccactgcactccagcctgggtgacacagccagattctgtcatctttaaaaaaaaaaaaagctgttttagaccatcatggggaatcaggagtggggtcagcatcaccaacctttactctcctctgcctccctccctctccacctgggaattgactcaagggtccaaggggatggatctaaacagccggaggggtagtatcagtaccaatagagctggagctgctgatcccacatgacccacgctgttcctggtggactcagcccatcagaaggcttcctcatccacacaagcgttcataaaagatgcacacaagtgtctaacacgaaattagccctcactaagatgaatgctgctcattcatcaaagagtagatccctgctccttgcagagagaagactgcaaggagcttctgggttaaaaaaaaaaaaaaacaacaacaaacaaaaattctccttccttctctgccggagcctccaggaagcccagagtcaacagggaccataaaccaggacacaatgaacccggaggccctgtccaggctggaggtttctgtgaacaagaaacaacttctcctacagctcttgagtaaaaacaatggagctaaattcattttggggcattagcattcccaaaggatgaagaggcagagataagaagtgacaatgcctcactgtgtactcactctcctcttccacatagtgccaagacctttcattttgggcctttcaatggccctggggaaaggctttctctagtttgtttccagctgcttttcttttcttttttttttcttttttcctttttttttttttgagacggagttttttgctcgttgccctggctggagtgcaatggcgtgatctcagctcactgcaacctctgcctctcaggttcaagccattctcctgcctcagcctcccgagtagctgggattacaggcatgcaccaccacacccagctaattttgtattttcagtagagacggggtttctccatgttggtcaggctggtctcgaactcccaacctcaggtgatccacccacctcagcttcccaaagtgctgggattacaggcatgagccaccacccccggccttccagctgcttttcttcatggccacaacagattttcctgtgagttttagtactgtggggtacaggggcagttgcagaaaaggaatctctatcaggatgcagcattctagaaaattacattactctgcatttaactacaggccagagaacaataattcttccaagattttcagtaggaagagcataaaaatctggggaaaagaagttgcatttccacttcttgagaaattatagtaatataagttgagaaagtaatttataataatcttatagagctgtacctctgtttaaacacagtaacataatgagaaagaaaaaatatagtgagaagccagggaaagctgggtgcggtggctcatgcctgtaatccgagcactgtggaaggctgaggcttgggcccaaagagttcgagaccaggccgggcgcagtggctcacgcctgtaatcccagcactttgggaagccgaggcgggcagatcacaaggtcatgagattgagaccatcctggctaacatggtgaaaccccatctctaataaaaatacaaaaaaaaaaaaaaaaattagccggacatggtggcggtcgcctgtagtcccagctactcaggaggctgaggtaggagaatggcgtggacccgggaggtggagcttgcagtgagccgagatggtgccactgcactccagcctgggcaacagagccagactctgtctcaaaaaaaaaaaaaaaaagagttcgaggccagcccaggcaacacagtgagaccgtctctacaaaaaatttaaaaattagccaggctttgtggctcatgcctgttgtcccagctactcaggaggctgagacaggaggatcactggagccagggaggttgaggctgcagtgagctatgatcatgccactgcactccagcctggatgacacagcaacaccctgtcaaaaaagaaagaaaagacaagaaaagaaaagaaaaaagtgagagacatgattttataatagacctgaggctgggcatgatggctcacgcctgtaatcccagcactttgggaggtcaaggcaggcagatcacctgaggtctggagttcgagaccaacatggagaaactttgtctctactaaaaatacaaaattagccgggcatgatggcacatgcctgtaatcccagctactcaggagcctgaggcacatcacttgaacccaggaggcagaggctgtggtgagccaagaccgtgccactgcactcctgcctgggtgacagagcgaaactccatctcaaaaaaaaaaaaaaagatagaaaaaaaaaaatagacctgaaaggtttcttttttcagagacctcccaaggtaccagcccagaccaggagatctgtactgcgggtgtccatttccaacctgaggctaagttatgtcttgaggctctgtacagccaagtcatcctacctgattccaaaaagaccaattaacaaggggactcctgggctcggcgcagtggctcacacctgtaatcccagcactttgggaggccaaggcgggcaaatcacttgaggtcaggagttcaggaccagcctggacaacatagtgaaacaccatctctactaaaaatacaaaaattagctgggcatggtggcgggtgcctataatcccagctacttgggaggctgaggcaggagtattgcttgaaccccggaggcggaggatgcagtgagccgagagtgcaccactgcactccagcctgggcaacagagcgagactccatttcagaaacaaaaaaagccaagaggctgattccttttcaagcatggccggagccatcccaacaaagcaccaattcccagcactgctcagcactccaggaaacgagacctgctgggaactgctgccaaagaaactgtatcgagtcagggtctggaatgccccagaacctgaggaggggtcaggcactgagctgtcgctccataaatccttttcggatgaatggagcataatgtcattttaaagaaaaggggagggaaggcatgacacagagaacaggatgaaagagaagcctgacttcagtggaaattcatttgatccttaagtgtgcataaaatcccaatagtcaccaggcgcagtggctcatgcctgtaatcccagcactttgggaggccgaggcaggtggattacgcagtcaagaggttgagaccatcctggacaacatggtgaaaccccaactctactaaaaatacaaaaattagctgggcgtggtggcacgcgcctgtagtcccagctactcaggaagctgagacaggagaatcacttgaacccgggaggcggaggttgcagtgagccaagatcccgccattccattccagcctggcgacagagcgagactccgtctcaataacaacaaagaaatcccaatagtcaaaatacaggtccaggtgcagggactcacacctataatcccagcactttgggaggccaaggtgggtggatcacttgaggtcaggagttcaagaccagcctgaccaacatggtgaaaccctgtctctactaaaaaatacaattagccgggcatggtggcgcacatctgtagtctcagccactcaggtggctgaggcatgagaatcgcttgaacccaggaggtgaaggttgcggggagctgagattgtgccactgcactccagcctgggggacagagcaagactctgtctcaaaaaaaaataataataatacaagatgggaagcctcatgggttctcactcactgcccccggctggctcagccacccaatcaatgcagcagctgttggcaatcttcaccccccgcctcgactcctgggccccatccccagctcaccttctccctgaatctccagccattccccacccaacttcttcacttttgtttttttcttttatcattttttttttttttgagacggagtctcgctctgctgctcaggctagagtgcagtggcgcgatctcggctcactgcaacctccacctcacaggttcaggcaattctcctgcctcagcctcccgagtagctgggatcacaggtgcccgccaccacgccttgctcattttttgtatttttagtagagacagggtttcaccgtgttggccaggctgctctcaaacttctgacctcaggtgatccgcctgcctcggcctcccaaagtgctgggactacagtgtgagccactgtgccctgccacacctttgtctttaaccagctctggacttccacattctaaaacaaagctgccttctctcttctcagctcccctctttctccagcaatatcttccctgcccttctccccctgtaccctgtcacactgacttttgtccccaattctccaaccatgcatttcctaacgactcctaaagaactaaatctaggaccttccagcattcttctgacttgtcacgccttgctcgactaacaagactgacctctcagcttcctagacctggccacccttctggctttcctcccacctctctacccacctcttaagcggaggatcctttctagcccagatcctttcactcaataccccaactgcctcccagttggtgccacccaaaactgcatctccagccagggcgcctgcatggctgctgggcccatggagtgggctctctgctgggaccgccacatggatatcccatgagggccatcaagtctacacactagcctccgcgttcacccgcattcatggatcttgaggaggcgcatgaccagacacctcaggcaggcattgtgacgttttttttgagacagggtctcattctgctgtccaggttggaatgcagtggcgtgatctcggctcactgcagcctccatctcccaggctcagcgatcctgctgcctcagcctcctgagtaggtgggaccatagctgggtgccaccacacctggctaataggcaggcattttggattctcattggcagctccttccctgccaatcacatcagttctttccctctctgccagatattgccctttctccagctctatcattccaacctcctcatcactagaatccctgccttctgtgtggacccctggtctgagctaagggtgcaagctggtggaaagaatgggtgattgaggctgtgtttacacggccgtttctttgtttgtttgtttgttttttgtgagacaaggtctcactctgtcatccaggctggagtgcagtgacatgataacagctcactgcagcctcaacctcgtgggctccggatatcctcccacctaggcctcctgagtatatgggattacaggaacacaacactatgccaggctgatttttaaacttcttatagagatggggtcttgcttattgcccagagtgggcttgaattcctggcctcaagcaatcctcccaccttggcctcccaaaatgctgagattacaggtgtgaggcactgcaccccactcacagcactgtcactgactgcatcatcagtagtccgtaaaagagaaggaagggcaaagatgataggtattacaaggggctaaatcctcccaatgcctccctgcctggctccaccatagcttctttcccattcgccacccattcaccattcacgtgtcaaagcggtctttttcttacacaaatctcacaggtctggtcctgctttaaatactttgatggattccacagttcccaggtcaagcaagatgcatgaccctgaactgcctggctcccacaaacacctccacaccctgggggggcctacaaagcactcacaagtccacagctctgtccaagctgttccctcttcctgaagggctctttctctcctttcacctggacagcacctgcctttctttttttttttttttttttttgagacggagtctcgctctgtcacccaggcagtggcgcaatctcggctcactgcaagctccgccattctcctgcctcagcctcccgagtagctgggactacaggcacccgccaccacgcccggctaattttttgtatttttagtagagacggggtttcactgtgttagccaggaaggtctcgatctcctgacctcgtgatccactagactcagcctcccaaagtgctgggatttttttttttttttgggttgcaggggtacggagtctcactctgttgcccaggctggagtgcagtggcacaatctcagctcactgcaacctccgcctcctgggttcaagcgagtctcctgcctcagtctcccaagtagctgggattacaggcgcctgccgctacacccggctaatttttatatttttagtagagacagggtttcaccatgtaggccaggctggtctcgaactcctgatctcaagtgatccacctgcctcagcatctcaaaatactgggattacgggtgtgagccaccacgcctggtcagcacctgcctttcattcggccatttggttttgttttgttttcatttttatttttaaaattttttatagagccaaggtcttgctatgttgcccaggctggtctggaactcctggcttcaagagatccgcctgcctcggcctcccaaactactgggattacaggtatgagccaccacacccgaccctcatttgctttaggtcaaactggctcaggtcatagatcaggaaagattcagcatcaacaccttttattttcctaggataaatagactcttcgaactggtatgacttaacatggagtagcacaacaattgttacaaggtctcattttcaaaattgatgattttaattgtaaaacaatgattcctcttattttgcacccctgattctctcatccaacaccagagaaactgcatctaaaaaacaccccactttaggaggccgaggtgggtggatcacctgaggtcaggagttcaagaccagcctggccaacatggcaaaaccttgcctctactaaaaatacaaaagttagccaggcgtggttgatatgcgcctgtagtctcagctactgggaaggctgaggcgggagaatcacttgaaactggtagatggaggttgcagtgagccgagatcgcgccactgcactccagcctgggtgacagagcgagactccatctcagggggaaaaaaaaaaaaacacctgtagccgggcgcagtggcttacacctgtaatcccagcactttggaaggccatggcaggtggatcacttaaggtcaggagttcaagactagcctgggcaacacggtgaaaccccgtttctactaaaaatacaaaaaattagccaggtgtggtggcaggcgcctgtaatcccagctacttcggaggctgaggcagaactgcttgaaccccggaggcagaggttgcagtgagccgaaatcacaccactgcactccagcctgagcgacagagtgagactctgtttcataataataataataataataataataataataataattaataaatgaaaaacacccaactgtgcacctttcctagctctcttgccatccactctttcccagtgcggagcaagaagtcctcccctgggctcacagacacggagggctcccacaggaaaatgtgttctgggaggcttgggaccacccctcacaggtgtgcttctcttgctgccattttcccccaggtgctgctggagttccagagctacacctgctcagagaacaatctggggaggaaatgtcccagaaagaggcagcaacttgcgggaggccacacagcaattttgtgggagtggcagtcaggccccggggcccgaggacagacataggaattcccaggccaggcctcctcctgcaattccatggcctgtgatcctctgtcccaaacgccacacataattagaagttataatcctgtaattccatgatgacatctttaaacttaaatatacctcaaaactactttttttttttttaatgctaaaagcaacttcacaaaaaagaagttttcccactctgccccacactgtcctgcccagggctcctcaccagtgagcaaagcccacagtctctctgtgtcacctgggagaaggaggaagatgccaagaccatttaagaactggatcctaaggctttgaacaattaagaattgattcgtttatgggaaagtttcacttccctatttataattatgcactgtcgtatctattataaaaacgaaaatcaacaacaatctctccaccctctcagtgatccctggccaagggccaaaagctatttttagacttgctcaggacctagagggaggaaggcttggaaggcatcaccatgactcccggctccaaagcatctttgtagcccaggccctgccgcctgcgggtatcccagggcccctgctccacaggctggggtcgcttttgagggactgagctccctgactgttatcttctgggcccaagagctcctggacatgccaagaacctgcgaggccggcacccgccacccgccgcccgccgcccgccgcccgccgccagcccccgccaagtctcccggacaacaagacaaatccgctttggcacacagtgagacgcacaagaccgtgggcctcacctgcggtgctcacgccctcctggacgacccggagcggaggagggtgcaacgccggaggctccctcccaccagcagctctcccctgctccctgaaaagtcccacaggcggactttggaagcattttggaggcaaaaagagaccgccggccgggcgcagtggctcacgcctgtaatcccagcactttgagagaccggggcgggaggatcccttgagcccaagagttcgcgaccagtctgggcaacacagcgataccccagttctacaaaaaattagcgtggcgaggtggcgcgcctgcagtcccagttactcgggaggctggggcgggaggatcgctggaggccaggaagtcgaggctgcagtgagctataatcgcgccactctactccagcctgggcgacagagcgcctaaaataaatatgagaccgccaacacgcctgggatggtctgtctccacccgcgctcccaccaagcgctcttgcaacgcgcccagaggccaagggcgccagcgcagccaggaacgggtcctttccccaggcaccagggatcgcaagcgaggggtggcggggggtgggaggggggagacccaagcacccctccaggtcctccgcccgcacctgcgcggagcggccacatgcgcctcccctactccccgcccagtcccggatgccacctgcccgggacgccggggacatcgccgcccccactcctccccgccagcctccgtccggccagcgccggcccagtgcgccccctccccctcccggcctagtggaccccgactgcgcgctcccacggcccctgcagggcccgggggaaaggaggtctggagcccgcaggtccccgcccgcccgcccgaagccgcccaccttccgaaagtagccgtcgttctccttctccagcggctggggggccgcgggcaacagcgcgtcggtcatgctagcggcgcgggcgcggagggcggacggcggactgaggcgcggcggctgaggctggcccgagaggacgtgcggccccgcccctgtccccgcccttccccgcccctccactcccaccccgtcccgcggcccttctagccccgcctgaggccgagcactggagccctggagacgcgccccgccccgtcgcgggccccgaacccgcgccccttgaggcgctcgtcacccggagagctgcgccctgggcgcggcgcctcggggttgtctgtgggcgtcgtggctgactcaactttgcgagtgccgcgagagcgcaggaaaggcactggggtctcaggggccgcagcgaagccctggctgtggacctgcaccctgccctggagcccggggagtcagtgaggaaggcgtggatccaggcgcgtccctcctgggtgaagcccgtgcgccgcgggggaaggggccagactcgacgccacgtcgagggcgcggcgggagctctgggccctgggcccggcggtttggaaaagcttttcccaagaggggagcccatggcggagggagcgttgactgccccgccgagcgccttgcccggactactcgggcttgttggcatgggatcaactcagccgattccctgtccgcgctgcaaagacgagtgggatccgctgggctcgcggactgccctgagagaggggaccaggaggggttttgcgccccagacacggcagatgtccttgagcacagttcttttttttaagagatgggacctcgctctgtcgcccaggctggagagcagtgttgcgatctcgactctttgcagcctcgacctcccaggatcaagcgatgctccagcctcagcctcccaagtagcaggggctgcaggcgcgggccaacgcgcccggcctttttatttattttttttatttttttatttgagacggagtctcgccctgtcgcccaggctggagtgcaatggcgcgatctcggctcactgcaacttccgcctcccgggttcaagcgattctcctgcctcagcctcccgagtagctgagactacaggcgtccaccaccacacccagctaatcttcagtagagacagtttcaccttgttggctaggcttgtcttgaactcctgaccttgtgatctgcccacctcggcctgcctcccaaagtgctgggattacagcttttgttttgttttgttttgttttgtttttaaatagatgcggggtctcaccatgatatcaaggctggcctcgaactcccgaccttaagtgatcctcactcgtctcgctctgtcgcccaggctgaagtgcaatggcgcgatctcggcttactgcaagctccgccccccgggttcatgccattctcctgcctcagcctcccgagcagctgggactacaggcgccggctaccacgcccggctaatttttttgtatttttagtagagacggggtttcacagtgttttccaggatggtctcgatctcctgacctcgtgatctgcccgcctcagcctcccaaagtgctgggattacaggcgtgagccaccgcacccggccgtggagcacggttcttaaccacctccgttttctaggctgcaaaatggggctcttttattattcttggattctttttttctcgggctgatggagggcagtaggacaaaagtgagtgttggaaagtagggatgaacttagtttaggagggaaagggtgacccatggggacagggtttgtatcagtctgccaccaacctcctgctggctgctagactctgtgggcagacgcctggcagcacgtgaagccaggaccttgccacctaagcagggacacccagcccgcgggccatgctcctcccggccgctgcttactgttacaactgcttctcccccagcaaagggaccgccctcagcggtcgcgatagatgccacaggtggaacagaatgcaatgtgctgcaaaaccagcccagcgttaacatatctttaaaaaaaaaaaaaaaaagtccgggcgcggaggctcacgcctgtaatcccagcactttggaaggccgaggccgaggccgaggctgagactggtggatcacctgaggtcaggagtttgagaccggcctggccaacatggtgaaaccccgtctctactaaaaatacaaaaattagccaggcgtggtggtgggcacctgtaatctcagctactggggaggctgaggcaggaaaatcactcaaactcgggaggcggaggttgcagtgagccaaaccgagaccttgagactgcccactgcactccagcctgggcgacagagtgggaccttgtttcaaaacaacaaaaaacgttagtcattggaaacatagtagaggttgcagctgtcagggacgtttctgaagccagtgtcttcgagcctatgcgcttcctaaaccgcacgtgaagctactgggttggtccaaaggtaattgcaattactgggtgagttgtgccagtcacagaaatgtaatcaggaattcagctcctgtagcctgaaaggacagaacaccctcatccagatttaatcctgcaggtgctgccccaggacctccaccaaagccccttaggagctaagtccttgaggattgaagaaaaactcctccggggaaaaaaaattacattaaaaaaaaagaagaagaagaaacaactatcaatctaatttcagcactcacaggtcacactattacttgtaaacagctactactgtttcaaggatcaggaagttgtgggccactctcttaccttcataatactaataaacgtatcaataatagagcctctactctagccagggagtttatagatactatgtttcgttcttgagacccttctgcaaataaaagcaataaccttcattcaacagatgagaagagcaaggctcagagcaatgaagtggccaccagcactccccttgctggctgaggtcattgcctaccacctttggatttttgccatctttttctgccaacttaaagctcaaattgcctttacaatttgtcgcacataatgccatctgtactgctgttaacttaataatcttttttttttttttttaagacagggtcttgttctgtcatccaggctggagtgcagtggtgcaatcttggctcactgcaacctctgtttcccgggctcagatgatcctcccacctcagcttcccaagtagatggaaccacaggcatgccccaccacactcggctaatttttttttattttttgtagagacggggtttctccatgttgcccaggctgggctggaactcctgagttcaagtgatcctcccacctcagcctcccaaagtggtgggattacaggcatgagccaccacgcctggccaataatcttttttttaaattactttatttaaacaaattaattaaatttatttagttagtttttgagacagtgtctcgccctgttgcccaagctggagtgcattggtatgattatagctcactgcagcctccaattcctggacttgaaggattcttctgcctcagcctcccaagtagttgggacaacaggtgtgcaccactaacttggctaatttttaaatttttgtagagatggggtctcactatattgctcaggctgttctcaaactcctgggctcaagtgatcctcctgccttggcctcctaaagtgctgagattacaggcatgagtcactgtgcctggcccaaattttattttaaaaggcaactatatcacaaccataaggggaaaaccagtgatactttccctgttagaggagaaacataaaagtgaatacaataaagggcaaaatatattattaaatctagccagatatcattgcctttttgagttgttccttttgttaaaaaggaagaagagaccaggcacaggctggagtgccgagatcacaccactgcactccagcctgggtgacacgagtaagaccctgtttcaaataaataagtaaataaaaataacagccaggcatggtggcgcatgcctgtagtctcagctactcaggagactgaggcaggaggattccttgagcccaggaggtggaggctgcagtgagctatgatcgttgccactgcactccagcctgggcaacagaccaagaccctgtttaaaaataaataaataggccgggcacggtggctcacgcctgtaatcccagcactttgggaggccgaggctgatggataatctgaagtcaggggtatgagaccagcctgaccaacatggtgaaacgccgtctctactaaaaaatcaaaacattagctgggcctgatggcacaggcctgtgatcccagctactcaggaggctgagacaggagaattgctttaacctgggaggcagaggttgcagtgagccaacatcgcgccattgcactccagcctgggcaacaagagcgaaactccgtctcaagaaaatagtaataataaaataaataaataaataggccaggcgtggtagcttacgcctataatcccagcactttgggaggccgaggcaggaggatcaggaggtcaggagtttgagaccagactaaccaacatggtgaaaccccgtctctactaaaaatacaaaaattagccgggcatggtggcatgtgcctgtaatcccagctgttcaggaggctgaggcaggagaatcacttgaacccgggaggcagaggttgcagtgagcccagattgcgccactgcactccagcctggaaaacagagcaagactctgtctcaaataagtaagtaaataaataaataaataatgtaaaaaataaaaaggatgaagagtaagaaaaggacgcgtggtgttaaacacacaccagcccacccaaagactacctcctgagcatcttcagaggaaaacgggctcctctctgtgtaagtcccagcggggcatttcctggccatgtgagccatctgagtgtcagtgcttggggctacatctgcgcagaaccagacatctttagacattctcatgactcattgcactggtacccacaggtctgttcttttatctctgatcccactttgaccaggcaattagaactgccgccgctgacccaacaggacagcagcatctcacctcctatttgtcaaccccattggtggtctgtgcaacaagaaccacccatgagcccctgtgctactaacaaaagagttgggtgggaacttctgagctatgcaaaagattaaaatctcaactgcaaacaactgttttgttaagtctcattttaccatctggtttaggtcagcaggtgcctgtccagggacccagttgggtgcctgtccagggacccagttcctccaagtaaaattcaagtgtcacgtcctaagaccttcttgttgacaaaggaatgttggtttttgagggcagcctgaaataacatcctctcttggggaatctgatgaagtttgccaaattaaatgcagaaattataagataatccttgaatgaataaaattcactgcaaatagtaaactcaactttgcaattttttttttttttttttgagacagagtctccctctgttgcctaggctggagtgcagtggcacgatctcagcttaccgcaacctccacctcccaggttcaagtgattctcctgcctcagcctccctaatagctgggattacaggcgcgcaccaccacgccttgctgattttttgtatttttagtagagatggggtttcagcatgttggccaggctggtcttgaactcgtgatctcaggtgatccacctgcctcggcctcccaaagtgctgggattacatgcatgagccaccatgcttggcccattttgcaatttttgtaaaaataattcttagaaattaccaggcccagtggctctcacctgtaatcccagcacattaggaggccaaggcaggaggatcacttgagcccaggagttcaagaccatcctgggcaacatactgaaacatccatctctacaaaaaaatttaattaattagccaggagtggccgggcgcagtggttcacgcctgtaatcccagcactttgggaggctgaggcggagggatcacttgcggtcagaagttcgagacctgcctggccaacatggtgaaaccctgtctctactaaaaatgcaaaaaattagctggacttagtggtgggcacctgtgatcccagctactcaggaggctgaggcaagagaatctcttaaactcaggagatgaaggttgcagtgagccaggatcgcactactgcacttcagcctgggcaacagagtgagactccatcacacacacacacacaaaaagccaggagtggtagcacatgcctgcagttccagatactcaggaagttgaggcagaaggatttcttgagcacaagagttcaagactgcagtgagccaagattacaccaccgtactccagcctgggctacagagcaagatactgtcttataaagaaaaaaaaaaaattggccaggcgcgatggctcacacctgtaatcccggcactttgggagcctgaggtgggtggatcacgaggtcaggagatcgagaccatcctggctaatacggtgaaaccccgtctctactaaaaatacaaaaaattagccaggtgtggtggcatgcgcctgtaaggtcccagctacccaggatgctgaggcaggaggacggcgtgaacccgggaggtggaggttgcagtgagctgagatggcaccactgcactccagcctgagcgacagagtgagacgtcgtctcaaaaaaaaaaaaaaaaaaaaaaattaaaattctcagaaatttaagccatttggtgccatggaggaacaccaactagagaggaccacatcaagttcagcaggctcaaagtccccttagccacacccttttggccctcacagtctcagttttccccactttactaaatatatatatacatattttttttttcgagatggagtcttgctctgtccccctggctggagtgcagtgcagtggtgtgatctcagctcactgcaacctctgcctcctgagttcaagctattctcctgcctcagcctcccgagtagctgagatcttaggcatgtaccaccatgcctggctaatttttgtatttttagtcaggctaaattatattgatcaggctagtctcgaactcctgatctcaagtgatccgcccgtctcagcctcccaacatgctgggattacaggcgtgagccaccgcgcccagtctacaataaattcttacacatagctgtcatttcctgcatacttattccgtgccaggtgctgtcctaagtacactgcatgcattagctcagttctcccacaaccctgtgaggtaggtactttatcatcccctttttacagagaaggaagctgagcctcagaggtcaccagcctcctaagtggcagagtcagggctgtctgatgctatgctatacactatactgtattacactcttccctagtacttaaaaggaaaagtgttttgacatatagggaggaagtgattgtggattaaaaataaatgaattacaagcctgggcaacatggtgaaactgtatctttacaaatgatacaaaaattagccaggtgtggtggcacgtgcctgtagtcccagctacttgggaggctgaggcaggaggattgcttgaacctgggaggtggaggctgcagtgagcccagatggtgccactgcactctagcctgggggacaaagtgagactctgtctcaaaaaaaataaaaaaataaataaagaataaatgaattacagggatggcaaacaataccaagtactggtgagactgtggaatctcatatattgcttatgggagtgtaaattgggatgaccacactggaaaattgtttgacatttgctactaaagaatatatgtgggccaggtgccgtggctcatgcctgtaatcccaacactttgggtggccgaggtgggtggatcacttgaggtcaggagttaagaccagcctggccaacatggtgaaaccctgtctctactaaaaatacaaaaattagctgagcatggtggtggatacctgtaagcccaggtactcgggaggctgaggcaggagaatcacttgaacccggcaggcagagattgcagtgaaccaagatcatgccattgcactccagcctaggcaacaaaagtgtaactccatctcaaaaaaaaaagaaaatatgcatgcaacttatgatccagaaattccaactctaggtagatacacaacagaaatgcatacatctatttactataaaacaggaatcagaatattcacagctgcactattcaaaatagcgtggccaaatgcggtggctcacgacagtaatcccaacacttagggacgcagaggtaggaggatcgtttgagcccaggtgttgagaccagcctgtgcaacatagtgagaccccatctctgaaaaccaaaaaaaaaaaaaaaaagcctctaactagaaagtacccaaatgccaatccactatagaacaaatgagtgtgaatggtggtatattcacacaatagaaaattgcacacaatgaaaattaacacattgctattatgtgcaacaacatggataaatgtcacaaaaatattattgagcaaagaaaactagacacaaatactgtatcattccattttatttgtatttatttatttttttcctgagactgtgttttgctctttcgcctaggctggagtgaagtggcaagatctctgctcactgcaacctccactcaccgggttcaagtgattcccctgcctcagccttctgagtagctgggattacaggcgcgtgccaccatgcctggctaattttttgtaattttagtagagatggggtttcaccatgttggccaggctggtcctgaactcttgacctcaggtgatccacctgctttggtctcccaaagtgttaggattacaagcgtgagccaccaccacgcccagcctccattttatataaagtacaaaatagacaaaactaacccattatggggttattgcttctgggattctggaaattttctatttcttgatctacttgttacacagatatgcttactttgtgaaaatacgcagaaccaggccagtgtggtggtttgtgcctgtaatcccagctactcaggaggctgagacgggagattggcttgacctcaggagctgaagatcagcctgggcaacataaagagaccttttctctacaattaataaacaaattagctggacatgatggtgcccgcctgtagtcttagctacttgtgaggccgagtgagaggatcacttgaggccaggaggtcaaagctgcagtgagctgcaatggcgctactatactacagcctgggcaagagtgcaagaccctatctcttttttttttttttttgagacggagtctcgctctgtcgcccaggctggagtgcagtagcaccatctcggctcactgcaacttctgcctcctaggttcaagcgattctcctgcctcagcctcccgagtagccctatctctttagggccaggcgcggtggctcatgcctgtaatcccagcactttgggattgctgaggcaggcggatcacgaggtcaggagatggagaccatcctggctaacacggtgaaaccccatctctactaaaaatacaaaacattagccaggcatggtggcacatgcctgtagtcccagcaacccaggaagctgaggcaggagaatcgcttgaacctgggaggtggggaggttgcagtaggctgagatggcgccactgcactccagcctgggtgacagagcaaggctccatctcaataaataaataaattaattaaataaacaacaaaaatgcatagaaccatgtgctcatgatttatgcacgttatttttttttaattttcttaaattttagtccatgtcctactgaacatacatgttatattttaaaaaggaaaataatgggctgggcgtagtggctcacgcctgtaatctcagcactttgggaggctgaggcgggagaatcacaaggtcaggagtttgagaccagcctggccaacatggtgaaacaccgtctctactaaatatacaaaaaattagctgggtgtggtggcaggcgcctgtaatcccagctactcgggaggctgaggcaggagaatcgcttgaacctgggaggcggaggttgcagtgagccaagatcgcgccactacactccagcctgggtaacagtgcaagactccatctaaaaaaaaaggaaaacaatgataaaaatgagtgatactggccaggtgcggtggctcacgcctgtaatcccagcactttgggaggccaaggagggcagatcatttgaggtcagttcaagaccagcctgaccaacatgatgaaaccccgtctctactaaaaatgggaagaaactagccaggtgtggtggcaggtgcctgtaatcccagctactcgggaggctgaggcaggagaatcacttcaacccaggaggcagaggttgcagtgagcagagatcgcaccactgcactgtagcctgtgcaacagaacaagactcggtctcaaaaacaacaacaacaaaaacaaaacaaaacaaaaaaagagtgataactgttttcaaagcacattgggtgggtttccgtgcatgttatgagtgaccatcacactgccagcacccatgcatggacccagaggaaggaatgacactgggcccaggtgattcagcccatcttcctatctgcagtttcctcataaggtcctgagatttgcactttcttgcatgtctgaataagaaagcaagcaagcctatattggcttataccttgccataaatataaatacataaataagaggccaggcaccatggctcatacctgtaatcccagtgctttgggaggccaaggcaggagtatcacttgagccttggtgttcaagaccagcctgggcaacacagcaagaccccgtctctacaaaaaatagaaaaattagccaggcttggtggcacatacctgtattcccagctattcagaaggctaggttagtaggattgtttgagcccgggagttccaggctgcattgcactccagcctgggtgacagactgagaccctgtctctaaaaaataaataaatagaacagaaagaaaggaacggtttgtgggctgggtgtggtggcttatgcttgtaatcccagcactttgagaggctgaggtaggaggatcactggcacccaggagcttgagaccagcctgggcaacactgcaaaattgcttctttacaaaaaatacaagtattagccaggcatggttgtacatgtctgcagtcccagctacttgggaggctgggatgggaggactccctgaacctggagaagttgaggctgcagtgagccatgatcgtgccactgcactccagcgacagaatgagaccctgtctcaaaaaaaaagaaaagaaaagctatgtggtggccaggtgcggcggctcatgcctgtaatcccagcactatgggaggccgaggagggcagatcacttgaggtcaggagtttgagaccagcctggacaacatggtgaaaccctgtctccactgaaaaaacaaaaattagccaggcgtggtggcgcctgtaatctcagctactcgggaggctgaggcaggagaatcacttgaacccgggcagcggaggctgcagtgagccacgatgccgccactccagactgggtgctagaacaagactcagtctcaaaaataaaataaaataaaataaaataaaataagataaactaaaataaaataaaaaagttattgggtgttctttgcctattttgaagctacaagctgtaagaaaattacgagtaatatagaaataaaatcatggactttggtgttttgtctgaatatatgaatttgtccccaatcttttttactttcttttactttttcttttctttactttttttttttttttcttgagacggagttttgctcttgttgcccaggctggagtgcaatggcatgatcttggctcactgcaccttctgcctcctgggttcaagtgattcttctgcctcagcctcccgagtagctgggattacaggcatgcgccaccatgcccagctaattttgcatttttagtagagacagggtttctccatgtttgtcaggctggtctcaaactcctgacctcaggttatctgcctgagtgctggggttataggcgtgagccactgcacccggtttcttttactttttctttgagacagcgtctcattctgtcacccaggctgcagtgcagtagcgcaaattctgctcactgcagcctctgcctctggggctcaattgattctcccatatcagcctctggagtagctgggactacagacacgcaccactatgcctggctaatctttgtattttttgtagaggtagttttggcatgttacccaggctggtcttgaactcctgggctcaagtgatcctccttacatggcctcccaaagtgctgggattatggacttgagccacttcgcccaactttctttactttctttttttttttttttttttgagacagagtctttgtcgcccagactggagtgcagtggcacaatcttgactcactgcaaattctatctctcaggttcaactgattctcatgcctcagcctcccaagtagctgggactacaggcatgaggcaccacacctggccaatttttgtacatttggtagagacagggtctcaccgtgttggccaggctggtctcaaactcctgatctcagatgatccacttgcctcggcctcccaaagtgctgggattacaggcgtgcgccactgcacccaccctgattaagtatagtttactatgtttatttatcctcaaacattccaaagcttgaggatagccacccagaaacaccaattccaaatgtatagggtcaacattccaaaggggagcccaggcacgatggctcacgcctataatcccaacactgtgggaggctgaggtgggaggatcacttgagcccaggagtttgagaccagccttagcaacacagtgagacctggtctctacaaaaaataaaataattagttgagcgttgtcaactagtagtcccagctacttgggaggctgaggtgagaggaaggctgcagtgagccatgatcctgccactgcactccagcctgggtgtcaaaatgagatattgtctcaaaaacgaaagcaaaaacacacaaaaaaagcattccaaagtggagaagttacggtttcacttatataggcagagacatacaatccttacagtgacttgactagctataggatgctaccttccaaggaagattgctttattactctgtgaggggtgtacccgtctgaggaagtcttatctctgccctgtttggtcttagttatttctagggtaaaaggggcagaaggtacagctgctcgccatgtgattcatgctgcataaccacattcctctcaagtttcaggatcatttacaattccaacagcagctgggcgtggtggctggtgcctgtagtcccagtaccagggatgttgaggctggaggattgcctcagcccagtagtttgaggctgcagtgagctatgattgcatcactgcacaccaaccctgcctctaaaaaataataatatcaacaataaagttccaacagctttaagtttgaattatttaattccacaactcatttatcaacatatgttgcagataactcatggggagtttaaaatactcatagtattgtcacaggttataggtttttctgattacgtattgctgttaatgaattatcccatatctttttgttgctgttgttagagacagggtcttgctatgttgctcaggctggcctctgattcctgggctcaagtgatcctcctgtttcaccctcccaagtactgtcactaaacctggctaattgcttcatatcttttttattttttttttccccttagagacagggtctctatagacagagatcctctgtctatagaggatctatgagcaaggtggctcatgcctataatcccagcactttgggaggctgaggtgggtggatcacctgaggtgagaagtttgagaccagccttgccaacattgcgaaaccccgtctctactaaaaaaatacaaaaattagccaggtgtggtggcgcacgcctgtagtcccagctactcaggaggctgaggcaggagaatcgcttgaacccaggagttggaggttgcagtgagacgagatcgcaccattgcactccagcttgggcaacagagtgagactctgtctagacaaagaaaataaactaaaaaaaaaaaaaaaaaagaaaattacaattaaattacaattacaactggaaagcagttgggagatttcctgaagaacttaaaacagaactaccattagacccagcaatcccattactgggtatatacccaaaggaatataagttgttctaccataaagacaaatgcatgcatatattcattgaggcactactcacaatagcagagacatggaaccaacctacatgcccacaaatggtggactggataaagaaaatatggtccacatacaccatggaacactacacagccataaaaaaagaacaagactggccaggcgtggtggctcatgcctgtaatcccagcactttgggaggctaagatgggcggatcacgaggtcaggagatcgagaccatcctggttaacacggtgaaaccccgcctctactaaaaatacaaaaaattagctgggtgtggtggcaggcgcctgtagtgccagctactcgggaggctgaggcaagagaatggcgtgcctgggggacagagcgaactccgtctcaaaaaaaaaaaaaaaaagaaacaacaagaccatgtcctttgcagcaacatagatgcagctggaggccattatcctaaacaaactaatgcaggaacagaaaaccaaatactgcatgttctcacgtataagtgggagctaaacattgagcacacatggacataaagaagggaatgacaggtgccaggcgcagtggctcacgcctgtaataccagcattttgggaggccgaggcgggtggatcacttgaggtcaggagttcaagaccagcctggccaacatggtgaaacccagtctctactaaaaatacaaaaaaaaaaaaaaaaaaaaaaaaaaatggccgggtgcggtggctcacatctgtaatcccagcactttgggaggccaaggtggatggatcgcctgaggtggggagttcgagaccagcctgaccaacatggacaaaccccgtctctactaaaaaaaaaattacaaaattagccagacatagtggtgcatgcctgtaatcccacctactagggaggctgaggcaggagaatcgcttgaacccgggaggcggaggttgaggtgagccgagatcgtgccattgcactccagcctgggcaacaagagtgaaactctgtctcaagaaaaaaaaaaaaaaaaccaccacaacaaccaaccaaccaaacaaacaaaaatttagcagggcgtggtggggtggacgcttataatcccagctatcaggaggctgaggcaggagaatcacttgaatctgggaggcggaggttgcagtgagctgagatcgcggccactgcactccagcctgggcgacagagcgagactctgtctcaaaaaaaaaaaaaaaaaaaaagggaataacaccagggcctacttgagggtggacctacttgagggtggaaggtacgaggagggtgaggatcggaaaaactacctattgggtactatgcttattacctggggaggaaataatctgtaacccaaatcccttgcgacatgcaatttacctatataacaaacttgcacatgtacccctgaacccaaaataaaagtaaaaaataataataataaaaataaagcgaagccccacggggcgagcatgaaatctgggagctcagccatttccctggaggtggctgggtgggcggtgggagtggacggggctgggcagtgactgctgccaaggcagggggctggcgcgagggacgggggtagggggctgggcaggcatcggtgtcgcctcgcagggaacagttgggtggcttccagcttatgccaggagtctcctcctcacccgcacatcgcggggctaggatgggatgtcgtggctgccaaatcctccgaggcaactcctgcctgggacggcctaccacaggatgggcctgagaatccggagcgcaggctcgggccgctaggacaccttcccccgcccgcggacccagccttccagcatcaccggggttcgcggaggagaaagaggaaaggcgtttggcctgccaaggccgccgtagcgagggggcggggcccggaagagcaggatggcggcgcgggacagtgacagcgaagaagatctggtcagctatgggaccgggctggagcctctggaagaaggtgcgggccgcgtgggccggcggagcctgtggaaaacaggccaagggcccaggattcgggccacaaaagcacaagtcggtgctggaccattgttagatcgttcccagcgctgggaacacggcgacgagggaggcgttagccgcgctctcggggtgctcaccttctgcagcgacagagagaggtttacagggacgggagacacaagcgtggccgaacaagggggcggcgagatagaaacaagaaaatgacggaatagctagtgtgagagcggggggtgctcaggcagtgtcttccccgagagaggacgtttgagctcagacttgaaaccgaggaagaaaacaaccatgagcaaatctggagggaaagcatttcaggcagaaggaacataaagtggcaaaggccctgaagtgggagccagtttaggaaattgaggggcaggcaggacgggtatggttgcagcagatgacagcgggggagacaggtagaaaagaatgtcagaggggctgacaggggctggatcttacttggtagggtaaagagtttggatcttgtactaagtgcaggattagggttagggttagggtcatgggaaattacacagggagggatatatatatgatttttagagacagggttttgctctgtttcccaggctggtcttgaactcctgacttcaagtgatcctctcgcttctgcctcccaaagtgcagggattacaggcttgagccactgtgctcggccaatttttaatgttattctatctttgatgttgagaatacactggttggggatgggtaagagtgaagcagggagattagcaaaaagaggtcaggagatgatggtggcatggatgggacagcagtggtggtggtgtgtagtggtctgggtggagatatattttgaaagcagagctgaccatacttgctggtggaatgtgggggtgaggggcaagatgaatcaaggttctctcctgtgtttctggtctgttccacttaacgacttgacttgttcagcaagttatgtattgagtgtccagtaagggctgttggctgtgctagccctgtagggaaggcagaggaagaatggtggaatcattgggccacaatttatttgcagacctcctgttggtgggggtcccctcccttttttcaccctgaccacatcctgccaggttgattgtacttctgggatatctccacttatgccccctttatttcctacaaacagttctggtggaaacttctgctggatactggcccttcttctaccctcggcttacaaaaggttgagaaaggggccaggcacagtggttcacacctgtaatcccagcactctgggaggctgaggtgggaggattgcttgaggtcaggagtttgagaccagcctgggcattgtagtgagactctgtctgtaacaaacaaacaaacaaacgaaacaaaaggctgagaaaggctagtcttccgaatgctttttatgtgtttgaagtcagctgttgcattttcttaagacatctctgttctacactcactatcccaagttctttttttatagagacagggtcttgctgtgttgaccatgctggtttcaaactcctgacctcaagcgatgctctcaccttggcttcccaaagtgctggattgcatgcatgagccacagtgcccaacattttttattttaaaaatagagatgaggccgggcgtggtggctcacgcctgtaatcccagcactttgggaggccgaggcgggcagatcgcgaattcagaagatcctaaccatcctggctaacacggtgaaaccccgtctctactaaaaatacaaaaaaaaattagctgggcgtggtgggggggggctcatgtagtcccagctactcgggaggctgaggcgggagaatggcgtgagactgggaggcagagcttgcagtgagccaagatggcgccactgcactccagcctgggcgacagagcgagactctgtctcaaaaaaaaaaaaaaaaaaaatagagatgggatccttctatgttgctcaggctggtcttgaactcctggcctcaagtagtcttcccagctcagcttcttaaagtgttggaattataggcgtgactctctacgcctggccccaaccatgtttttgttttttttttttttctgtgacagagtcacgctctgttgtccaggctggagtgcagtggcgcgatctcggctcactgcaacctccgccttccaggttcaagcgattctcctgcctcagcctctcaagtagctgggattataggtacattccactacgcctggctaatttttgtatttttagtagagacagggtttcgccatattggccaggctggtcttgaagtccttaggtcaagcaatccatctgccttcacctcccaaagtgttggaattacaggcgtgagccattgcatgtggcccccaaccttgcttttgaagtggaaggaaaggacatggatttgtagactttgtttttctggactaaaaacattctttaacttctcagtaatacaagtttttgaggattgattcattgtcttctaagcacttttttttgagagtttcgctcttgtcacccaggctggcatgcaatggtgcgatctcggctcactacaacctctgcctcccaggttcaagagattctccagcctcagcctcccgagtggctgggattataggtgcccaccaccatgcccggctaatttttatatttttagtagacacagggttttaccacgttggccaggctggactcgaacttctgacctcaggtgatctgcctgcctcggcctcccaaagtgctgggattacaggcgtgagccaccatgcccagccagttttctaagcactttgaaatttaaatgcactctgtctgtattttacgatataacacactagactaataattatttttactccctgctttgaagttttagtgacaggttagacaggcattggtagaggagaactccattttaattaaagttgctggccctgacagaaaggtttattagttaagagttaaccagggagcctagtgacagtggctgaactttatagacacataggccttctaatctggaaagaagggggccagatacttacctattctttccttagacacttccacttggttctagaattcttatctacagctcattctatacccagattaattttagggccaattttctcctccttgatgctgtgactctcacacttaaaactaaccgtggcttccctcgcccccaggacacactataaaccctgcagcactatgttcaaggccccctgcactgtccgcctttctggttccatcttccgctcattccttggcctcccgttagactggactttctcaatacacctgaccttgccctttttttttttttctttttttttttgagatggagtcttgctctgcctcccaggctggagtgcaatggcacgatctttgctcactgcaaccaccgcctcccaggttcaagcgattctcctgcctcagcctcttgagtagctgagcttacaggcgcatgccaccacgcccggctaatttttgtatttttagtagaggcggggtttcacaatgttggccaggctggtcttgaactcctgacctcaggtgatccgcccgcctcggcctcccaaagtgctggaattacaggcgtgggccactgtgcccagcgactttgcccttttatccctccttctgtttactggtgggagtcagtggctctgtgtccctatctgcagctatcaaaattctgcttattcctaacggtggctgatgttgcagaccttctcattgtcagaagtgctccagtacgtgcaggtcttctctgctgggctcggagtgtcctgagaacgggagcagagttttgttcagttttctataccccagctctagaagggctgcttgcatggcaaggccctcatcaactttttgtttttgtttttgagacagtcttgctttatcccccaggcgggagtacagtggcatgattatggctcactgcagccttggcctcctgggctcaagcgatcctcccagctcagcaccccccagcccccagtaaccaggactataggcgcataccaccatgcccggctaattttaaacattgcgtcactatgttgcccaggtttgtctcaaaccactgcttctaatgactcgaaccactcctacctgggcctctcaaagtgctgggattacaggtgtgagccactgcacctgactcccccaccctttaaaaaaaatgtaaccattagccaaccaggggctcgttgaaattttggtcagggaatgagaggaaggaacagtataggaggcatctctggcttggagacagagctgagatctggtttcacctttgtgcttattagcagtgagtctcagggaagttacttaatcagtatccttatcagggtatgataaatgagatgatatgtactaaaggaaggaattagttgtcattagtagcagtaattaggacatggcctggctaaaatgccacccacctcctttctggagttgttccgtcactggttagaggtggtgccttctgctcaggagacctgtgggagctagttggccacattgcttggccctcatcatctgccgccacaggttgcactcagttgtctgcagatcttatctcccctttgagatcagaagcaccaagaatagcaccaagcactggcagcacctgttccctcttaccgtagcccagtgggacagttggcaatgcctggagacctttttggttgtcatgcctgtggggcataagctgctgctataggcccaggatgctgctgaacatcctgcaatgtacagaacattcccctgcaacaaagaattctccagcacaaaatatgctgagattgagaagctctgccatagccaagaatgatgccaagtgcatatatgtaatgtagtgtgtgtactgcatttccatgaaatggtgaacatcttgggttgtgggacccaagttgtaatttagtcctttagagggaaaagacattgtagctgatattaactgatttcccccatggccagggactgtgctcagctgtttacgtatgatatttaatcctcgttaccaccctacaaagatgggcttctttattaccttgattttacagttgtggaggctgaggcttagagtgatgaagtaacttgttcaagatgacaaattttttttctttttttgagacagaatctcactctgtcacccaggctagagtgcaatggcatgatcttggctcactgcaacctcctcctcctaggttcaagcgattcatctgcctcagcctcccgagtagttctgcctgccaccatgcctggctaattttttgtatcttagcagagacggggtttcaccctgttggccaggctgttctcaaactcctgacctcaggtgatccacccgcctcagcctctcaaagtgctgggattacaggcatgagtcattgcgccaggctgatgacaaatcttaacaagtagtagaaggggatttgaattcagatctctaggtctttaaacctgggctcttggctggacgcggtcgctcacacctgtaatcccagctacttgggaggctgaggcaggagaaccacttgagcccaggaagcagaagttgcagtgagccaagatcatgccactgcactccagcatgggtgacagagactgcatctcaaaaaaaaaaaataaataaagtatttcttgtgtctccctcttcttgttaagtacttcataggcatttaatttgcataacaactccatgaaatagctgttaccattaatgccatttctattttacagataagtaaattgaggcacagagagtcaaggctgaccaaagtccagcactagtaaagggagttggcttgaaactccactgtgactctcacccttaactcatacccttaaccactgtataacctacttcctcttgtgaacttttgaaaataacttgattttttttattttttaaaaaaatttaaataaattcaggattttgaattgtagttgataaaacgaggcagtaatttgtgccatagtacctgggagtttaaacctaaggaattgttaggctaggcctaaaatgtattagattaaattcccttgcttgtgtgatgtctcaacccagccctttcaacaaagtaggaaaaggaataggtttaaagaacactgtggaatcaggagattcacagaaattaaggaaactcttaggagtcggggaaaataggcaataccaaaggaaaaatgccggattcagggatggtgtgacgttctagaagaggtatggaagtgtatctctccttgccaagtgccaccccagcttctgcgcccttcatttgaagccaggagatttcagtttcatctgtcggaactctcctgacattataatttttttttttttttttgggggagaagtctcgctgtgtctcccatgctggagtgcagtggtgtgatctcggctcactgcaacctccacctctcgggttcaagcgattctcctgcctcagcctcctaagtagctgggattacagacgtctgccaccacgcccggttaatttttgtatttgttagtagagccgggattttgccatgttgaccaggttttgtaatggaatttagtgggaaaagagggcaatcattattacataagcttataaaatatattgttttctaggctatataaagcagtaaagtctaggaataacaatttaaatgattatatttgaattataagaagtaaacaatttatgatatttaaaaagtgacattttccctaaatttgaaccgaccatctcctctctttttcatttaaaaaactttttttttttttttttttaggtgaaagaccaaagaaaccaatccctcttcaggatcagactgtcagagatgaaaaaggaaggtataaacgattccacggggcctttagtggaggtttctctgctggatacttcaatactgttggctcaaaagaaggtatcattttcctaattgtagctattataccattaaagcaaatgatcaaaatattgattctccctcacccttgctttttttttttttaattttgagacaagagtctcgctctgtcgcccaggctggagtgctgttgtgtgatcttggcttactgcaacctccgcctcctggattaagcgattctcctgcctcagccttccaattagctgggataacaggcgcatgccactatgcctggctaatttaaaaaaaaatacttttagtagagacaggagtttcaccatgttggccaggctggtctcaaagtcttgaccttgagtgatctgcccaccttggcctccaaaagtgctgggattgcaggtgtgagccactgcacccggccacctttgcttttttttttttttttgcgatggagtcttgcactgttgcccaggctggagggcagtggtgtgatcttggctcactgcaacctccgcctcccgggttcaagcgattctcctgcctcagcctcccaagtaggtggaattacaggcgcctgccaccatgcccagctaattttttttgtgtttatagagacagggtttcactatgttggccagtgtggtctctaactcctggcctcaagtgatccgcctgtcttggcctcccaaagtgctgggattacaggtgtgagccactgcgctcagctttctctgaacatacactgtaacctcttgtgttctttggatatttggatgtttccagagtcaacttgtatcttgttcattgattgcaaccttatggttaaagagttttctttcactttgtaaaaaaatgcatacctcctaatcagatgattaaatgataataatgactttggtttttattgtgtcttgccattcacgaaatactcttaaacagagtctttcagttaatcattgactgtctctcgtgactgagtgagtgaggagggcaggtgtcacagggatcttgcagatgatgccaccaagggtcagagaggttaaggagccagcatggcgttagtgctgagggaagagtcaccaggtgccctcttcagacactggggaccacagcaagactggctcctcagtgctctctacctggggaaaagtcagttaaatcttttatgttatgtacttttataaatgccaagttgtttaaagtattgtatgttttaagatatattaatctagaagcatttttttgaactggaagaaatggctttctatatctcagttatgaatggaagatgaactgattttattatatgtgctgccatagtgagcacggaagatgaactgattaattcacatagcaattatcaagaaaaagatgggctagatcttttataatttttttttttttttcctgagatgtagtctcactctgtcgcccaggctggagtgcaatggcatgacctcggctcacttcaacctccgcctcctgggttcaagcaattctcctgcctcagcctcccgagtagctaggactacaggtgcccgccaccacacccggctgatttttgtattttagtagagatggggtttcaccatgttgttcaggctggtctcgaactcctgacctcaagtgttccacccgcctcagcttccccaagtgctgggattacaggcgtgagccaccatgcccggccttaccattttatttaattaattgatttattttttgagacagggtctcactctgtcgcccaggctttagtgcagtggtgcacctactgagagtagaccttccccagatgcctcagctcacagggcccttggagagaatcaggaaggaggtgcaaccctcttagagaaaactaaacaactttatgtgcagaggttacagacatatgtgacctccagagcattccctgtttgtggacgtggcacatgctcggtaaccgtggtcagggaacaaggccattggttacaggattccagtgtctgttgaaactgggggactggcagagccgctgcccttggacctgccaggttgagtctttggtcagggtactgtgaatgttgcctggattccttctgttactctctctttatccactctgactgattaaaacaccttgacatcatatctttacacttgatcttagccaaaaggcctagaagcgatgacatcatttctttagatatgttaatatgccagtggaggttgctggtctcacgtcctgcattttaaggtgaccttgcatctgtcagctcagatctgcttgtgttcatttcacagtttaactttcaatgtgtaattctatatctcttggtttcactttcttatggggaaaccttaatgtatccactaagttttacatcaggggatacagggattaataagaaatttatgtggaataattacgtctatataagcactgagatgggaagtagctaagagtttatagttattgggaatttcaagtccatacatgttatttaatcatttactcatagacccaaatactctctaggattgtaaagttctaaactctttttttttcaggatggacaccctctacctttgtgtcttcacgacagaacagagcagacaaatctgttcttggtcctgaagattttatggatgaagaggtgcgtgtgcaaaactttaattgccaattagctggtgggacaggtctagttggttgctgtaactgccttctctctccccagaaggtccaatgtacgatttcctctttgtttgtaaggctttatcttttaggtatttgatgtgcagtgtcctgtacatcagtagagtcttgttcattggaggagcattttatactggggccaatttctaaaatcaagagtgtaaggggaaagtcatatacaggcaatttacttgaaaagcctcgtggctgggtgcggtggctcacgcctgtaatcccagcactttgggaggccgagacaggcggatcacgaggtcaggagatcaagaccatcctggctaacacggtgaaaccccgtctctactaaacaaaatacaaaaaattagccgggtgtggtggcgggtgcctgtagtcccagctactcgggaggctgaggcaggagaatggcgtgaacccaggaggcagagcttgcagtgagctgagattgcgccactgcactccagcctgggcgacagagcaagactccgtctcaaaaaaaaaaaaaaaaaaaaaaaaagtaaagcctctattgcctcaaaagctcagtatccatggtgctgggtctgcagctttccacagtaactctcaggcacactgcagtaaagaactgtgagtgactgaactaaaattaaacttctgctaccttaaaacctggtcgcggattcacccatgataaagattaaatagggagggagagcatcaggaagaatagctaatgcatgctgggcttaatacctaggtgatgggttgatctgtgcagcaaacctccatgacacacatttacctgtgtaacaaacctgcacatcctgcacatgtaccctggaacttaaaagttgaaggaaaaaaaagattaaataaaacatttatatcagcatgtgcgaggctgcaggtaagagggaaggaagtctcattctttttttgagtagcatcatctagaaggaaacatatctcatgtagcaagaagtctagatgtgctgagaccccaggctctctcttctcagtcttctgttggcagcttgtccttatactacctctcctcatgattgcaaaatggctgtagtagttccaggtggcacatccaggatgacgttgttcaagagaactttcctcttggtcccttttcttttcttttttttttttcctgagacggagttttgctctgttgcccaggctggagtgcagtggcgctatctcggctcactgcaacctctgcttgccaggttcaagtgattctcctgcctcagcttcccccgagtagctgggattacaggcgtgtgcaccaccatgcctggctaatttttgtatttttagtagagacggggtttcaccatattggccaggctggtctcggactcctgacctcaggtgatccacccacctcggcctcccaaagtgctgggattacaggtgtgagccaccgcacccggcagtctcttttcttaaaagcaaagtagcctttcatatgagtcctaccatgaattttctctacatttgcttgcacaaattgttttacatgcccattcctaacgcagtccctggcaaggaaagtgggatcaaaatgactggcttagataagacacaaagccccacttcataatcctgcctccccaacactgggagtaccactcctgcaatgtgtggcggtgcagaggaaggcaggtgcctagacaacgtcaggactctgcaaggaaagaggaaacgtgccaatggttggacaggcagccagcaacatctgctccagtaaaggcaaaggcacctgactctaggcctggcactcacacttgtgaatgcttgctggctggaactccaggctttgtctctttcacgctgacctttgagatactgtcgagaagaacacggccattacttcctgtcttcccagcttggtcatgctcggggtggccctaatgagcagcgactatcatgccctgcccttggccactggctttaccttgtgtgaggatgaggttctaaagtcagtgtgaggcggggcacggtggctcatgcctgtaatcccagcactttgggaggctgaggcgggtggatcacctgaggtcaggagttcgagaccagcctgaccaacatagtgaaaccccatctatactaaaaacaaacagctagccaggcatggtggtgtgtgcctgtaatcccagctacttgggaggctgaggcaggagaatcacttgaacccgggaggcggaggttgcagtgagcccagattgcaccactgcactccggcctgggcaacaagagagaaactctgtctcaaaaaaataaataaataaaaaataaagtcagtgtgtatgtctgtcactctgctgatccagaactaaattttgtagttttaactttttttttttaacagaaataaaactatgtgatgtattgtgtatagtcactttccaaataatgtaattctgtttgaatttttttgaaggatcttagtgaatttgggatagcacctaaagcgattgtcaccacagacgattttgcctccaaaaccaaagacagaatacgagaaaaggctaggcagttggccgctgctactgcccctattcctggagccaccctccttgatgacctcataacgccagcaaagtgagcatttccttctgactgtcatgatcttagcaccggtgttttgcatatgtgtgattctcttgctgagggatagtttgattgcaagtgagacaagccttcttaggctcaaagtctaagtgaaaaagggggttttgcgtaaaggatcttgcactgtcattgcacggagagattaagaactccagccactagctgtgctgctggggctctcagaggctggagagctgttaggaattacagtgacttctcccaccacccctccagaccttatagcctcgcctctgtctgcctccttctaccctcactttctgtgtatctccttgtgctcctgggcttgtggcctgatatggcagccttagaccttcagggattcccaggccacatgcttagcaaagactgtctagagtccctgtgatcccatcgtaaaggcccaggagaaaggtcatctgattgacttccccagttcaggtgtgcaccccagtgcagcctgctgtggctggaatggcagggtcacgccagatgtaatgtgggtgagggcaagggcccaggcaagacaggcctaggaactgagcaggaactcagaagccgcttatttcatattctttgttaatgttattttgaaaagttcattttcaatgccttgctatcctagattatctgttggtttcgaattgctaagaaaaatgggttggaaagaaggacaaggagttggtcctcgagtaaagagacggccacgccgacagaaacctggtgtgtatgttaattgattaactgttatcactgctgcagcgtactttttttttttttttgagacagggtcttgctctgtcgcccaggctggagtgcagtggtgcgatcccggcatactgcagccttgacctcccgggctcaagtgatccttccacgttagccccgcaagtagctgggaccacaggcatgtgccactgcgccaggctaattttttgtattttttgtagagacggggttttgccatgttgcccaggcccaggctgaggattgcctgagcaaattccaataaacgaaatagctgggcccagtggtatgtgtgtcttctaaggctttttatgtgtaatgcatgacagcttccagaaaggctgtgctagtttatgcttctgccagcagcatgtgagagttcatgtttcctaccctcccccaagctgtcacagtttaacattattacttgttccttatttcttgccctgagtctccccagccagactgtaagtgactctttgagggtaacagtcatttcttttgggttccttatgctgtggggcagtattggttactcattgagcacattactgctaggtagggcaggtgctggtagaaaatgattcctggctgggtgcagtgactcatacccataatcctggcactttgggatgctgaggtgagattatctttgagcccaggtgtttgagaccagcctgggcaacacggtgaaaccctgcctctaccaaatataccaaaattagccaggtgtggtggagcgcacctgtagtcccagctacgactcaggagagtgaggtgggaggatggctttagtccagaaggttgaggctacagtgagctatgatcatgccactgtacttcagcctgggtgacagggcgagaccctgtttctaaaacaattcccagttatcttcctctcaccgtaatgctgtagcacattttataaatgtacccatgtacctctgaagagttatcagtgaggtttttttttttttttttttttttgagatggagtttcgctcttgttgcccaggctgaagtacaatgcgcgatctcggctcactgcaacctctgcttcccggttcaagcgattctcctgcctcagcctcctgagtagctgggattacaggcttgcgccaccatgcctggctattttttttgtattttttgtagagacggggtttctccatgttggtcaggctggtctccaactcccgaccttgtgatccaccccgcctcagcctcccaaagtactgggattacaggcatgagccgctgcgcccagcctttttttttttaaattttttgtggaggcggaatctcactatgttacccaggctggtcttgaactcctgggctcaagcgatcctctcacctcagcctcccagagtgctgggattacaggtgtgatccaccgcgcccggcctggtcggggttttctatttgtagtcactcatgactattgcatttgaaatctcttttctagatcctggagtcaaaatctatggctgtgcattaccccctggaagctcggaaggatctgaggtattgcatggtgtgactgaccttcactttggtacaacagcacctgtttctgtatgactgtgaaatttggttggagacaattttagaaatcagatccaataactatacagttaaatactcataccctaaagctatcctcattatatcagcatacatattcagcaacatgccagcaccacagatacccaggtctgttcagcttcataaaatggagttggtgttagcatcctttgtgccagaaagtgatttagtcatttataacagcaccaatgaaagtttgctaattgttctgtgtggcattaatcactgcgttttcaattagtattttgtgggtttactttgcatccttcagtgactcaccttaattccactttaaacggaaatagggtgaagatgatgactacttgcctgataatgtgacctttgcacccaaagatgtcacacctgtggatttcacacctaaagataatgtgcatggtctagcttacaagggcctggatccccaccaggcactgtttggaacttcgggagaacattttaatcttttcagtggtggttctgagagagctggcgatcttggagaaattggactgaataaaggaagaaaattgggaatttcaggccaggtaaaattattttctattttataaagggggagtcattgataaatgagtctactttctttctttcttctttttagaggttctttattttctttttttttccccctaatcctcaagtggaatcaggtcaaagattctttcttaaaatgcatttttaaaatggtgactttgccatttcattattaccatttctgtttttttttgagacggggtttcgctctgttacccaggctggagtgcagtggtgcgatcttggcttactgcaacctctgtctcctgggttcaagtgattctcctgcctcagcctcctgaatagctgggattataggcatgtgccaccatgccccactaatttttgtatttttagtagagacggggtttcaccatgttggccaggctggtctcgaactcctgacttcagatgatccacctgcctcggcctcccaaagtgctaggattacaggcatgagccactgcgcctggccaccttttctttctttctttctttcttttttttttgagacagagtttgactcttgttgcccaggctggagtgcaatggcgcgatctcggctcaccgcaacctccacctcccgggttgaagcgattctcctgcctcagccacctgactagctgagattacaggcatgcgccaccaccccggctaattttgtatttttagtagagatggggtttctccatgttggtcaggctggtcttgaactcctgacctcaggtgatccacccgcctcggcctcccaaagtgctgggattacaggcgtgagccactgcgcccggcccaccttttctttttataaacgtgtttttttttcagtcttttaaacaaaaatgctacttgttagaggctcctttccgcagagagtaggagttcttccagcgggcagtagagtagcagcggcccttagaccccagccaccagcgttggcccaggccgcattgatcagttgatgaacatttcttcctttctcctcttggaagccacatttccacccctgcactgctgcttggctttgttctccactcctcttcctgtgctgggacctggagccatggctgttgtggggactggagggcagtgttggcagtagggacatggcattcacctctggtcactgttttccagaaaacttgtgtgtgtgttggtcgatctgggacccccgttcacttctctcttggtgatcttgaagtgctaacatggtttccaatcacatccttaaagtagctttatccctgaagatcccagacataccctaacacctgtgctcagtttgaaaccttgtttttttaaaggcttttggtgtaggtgccctggaagaggaagatgatgatatctatgccacagaaactctatccaagtatgacactgttctgaaggacgaggagcctggagacggactctatggctggacagcacccaggcagtataaaaaccagaaaggtaattcgacagccacaaacctaatggcaggaccaagtgtcagggtatcaggaaggaggggctgcaagagcgatacaggagcaccagcctctgttgttggtcaaagtcacggtaagaaacaaaacaaagaagcgaggcccagcatgggaagtgaaacaaatgcaggattcagacctggccaaggccaaagccagctgtcaaggtggggcccaggtgggagggagggagaggtctgtaatcagggaaagaggaatgcctggaccagtgaccacatggctggtcagagctggcagtgggtcaaagggaagcacccagagctcgaggaactgggcaggtggccaaaggaggccaacacatgcagcaggtcagaaggtcaagccaggggaccaggaggcaggtacaccaacagcctgcagcaagatggagctgggcgcccagtccgtcttctcccttgagtccctggctctgaggaggctcttgttgggataagaggctgacatctctcaacacaactttaacttcatgctgtgttgaaatttcaaggtgaatcagatcctgtggtttgaagtcacatttcagttgtttccagaaaaggtgcagggccagacagtgtagagtcggtattagcagcatgtgatttggagtcagtcagacctgggtttggatgccagctctccattgcccagctttgtgaccttaggcaaggctcataacctctctgggcattggagtccacatttgtaaagtgaggataaaatccactccagaggtggttgtgaggattaagtggcataactcagtgtctggcaaagcacctgtcccaaagactgaagaagtggcacctactattctttggttatcatacagtcatgtgtcacttgactgggatggtatgacagggaacccagggttttacacaggacactggaagggcatgtgtacccagtgttaggagacttaacctccgggtggtcagtgggctgctagtacttacttccttttttttttccttccaatgtttttctttttttttcccctgagtcatttagcttctgagccttcttccttttgcctccctatagtttctgatttctgtccccaaactatggattatttttatataacttaaatgaagatatattaatatatcataatatactatttaattttaatactatattataatcaatataccattatatattgtatatgatttatattttatataattaatatatcaatactattggtatattatgtaacataccaatacattattacatagtaatgtattgatctattttaattattcattatttattaaaagtggtgggagtatgaaattgataatatcctatatctgttaatataaatgatatttaatatacaacatattaataacaatatatcaatcctttaataattaatgatatgtaatgacatatatttaagtccgcctgctgaaccacatctttcacttttccctcgtgcaccagctttgcccccagctgattggttctcactccttccactgagctccgagcctgtccttgtccctctctgctgtggcctctctcccccagcttcctctctccccccctgcagggtcacagcatctgtagttttgactgtatgattttctattcggtgaatctatctttattttacctagtctccacggttgattttttacatttttaaattttttttttttgagacagagtctcactctgtcacccaggctggagagcagtggcatgatctcggctcactgcaacctccgtcccccgggttcaagcgattctcttgcctcagcctcctgagtaactgggattacaggtgtgcaccaccacgcccagctaatttttttttttttttttttttgaagaaggaatttccctcttgttgcccaggctggagtgtaatggcctgatcttggctcaccacagcctatgcctcccgggttcaagcaattctcctgcctcagcctcccaaggagctgggattacaggcgcctgctaccacgcccagctaatttttgtgtttttagtagagatggagtttcatcatgttggccaggctggtcttgaactcccgacctcaggtgatccgcccgcctcggcctcccagagtgctggaattacaggcgtgagctaccatggctggccatggttgatttttaaattctcattttttttttccatgatcaatagggctataatgaatatttttctgattctgtctttatgtacatttgtttatttcttcagaattcttcagaatgaactcataaacatgaaatttctgggttttgagataatacaagttccaagaatgtgaaattgaatcccacattacctgaagaaattttagtaagttctagaagctttaaaaaaagcccaacatgccaggtgcattggcttacacctgtaatcccagcactttgggaggctgaggcaggcagatcacgaggtcaggagatcgagaccatcctggccaacatggtaaaacctcgtctctactaaaaatacaaaaattagctgggtgtggtggcacatgcctgtaatgccagctactcgggaggctgaggcacgagaatcacttgaacccaggaggcagaggttgcagtgagccaagattgtgccactgtactctagcctggtgacagagcgagactccatctcaaaaaaaaaaaaaaaaaaaaaaagcccaacaggagtcaaagcacaaagaatggttttgtggggaggggagagatgtggtggtgctgaatgatgagtggctaaaagccttagctcatctgcactgcttgctgttcctgcttcaggcctgagctcctagcctgtgaaagagcttttgatggtcatgtagaaggggctttttttttttttcagaaggggcttttgagtgcagagaatacagttcatttatacggacttttggcgtaaccagtacgtgcaggaaaaccttgagaatcaaatcaaagagcttttgttggtggggttgtctctatgaccagaagacgatccccacctccaggtcagagggcattggtcattcagtttcctatgtctgtgatctttatgtcttgttaaagattacaggctgacctggtggcattgcctttcatccctatttggattgttgctaaggagatggccaggtagtcaccctgtagttcttcacctagttttacacatgacgctctcacagttgtgatttgtattttcctccatgcttgtccttttggtggtttttcttgatcttttactccacggggtatatcctttggtgcccctaaggtacttcttctaaaaatcacgtcaatatgcttgtcttggaggaccacagccttgtgacctgggtagcccaatctgtccagggcggtgtgggccgggccttagtcactgagtcaacagaggtgtggggctttgcttaccacttgttcttccctttactgctgctgttgagtgatagcatgtatgacacgtactatttatgttcttagagataagaacgtaaaatgctgatgtgttctgtcttattctaatcatctctacttctggaattaatctatgacatcattttgtagaatcagagaaagaccttcggtacgttggcaaaattttggatggattttccttggcttctaaacctttatcttctaagaaagtaagaaaaactttttttctttctttttttactggtttagttcttaaaatatttgctgctatgtgatctgagttctattaacaacaggaaagataagtaaattctgttttcaaaaaacaacagcctggttactagtgattgtctagaaaaacattctacattagaaataccagggcgaggcgcagtggctcatacctgtaatcccagcactttgggaggccaaggtgggtggatcacctgaggtcgggagtttaagaccagcctgaccaacatggagaaaccccgtctctactaaaaatacaaaattagccgcacgtggtgtcgcatgcctgtaatcccagctactagggaggctgaggtgggagaatcacttgaacccaggaggtggaggttacagtgagccaagatcacaccactgcactccagcctggacaacacgtaaaactctgtctcaaaaaaaaaaaaaaaaaatcagttggccaggcgtggtggctcacgcctgtaatcccagcactttgggaggccaaggttggcagatcacctgaggttaggagtttgagaccaccctggtcaatatggcaaaaccccatctctactaaaaatacaaaaattagctaggtgtggtggtgggcgcctgtaatcccagttactcgggaggctgaggcagggagaattgcttgaacctgggtggcagaggttgcagcgagccaagatcgcaccattgcactccagcttgggcgacaagagcaaaactccgtatcgaaaagaaaagaaaagaaatatcagtcagtagctacattgtgataaaaatatctaatttctatttttttttttttttttgagatggagtcttgttctgtcacccaggctgcagtgtagtgatgcaatctcagctcaccgcaacctccgcctcccaaattcaagcgattctcctgcctcatcctcctgagtagctgggattacaggcgtgcaccaccacggctggctaatctttgtatttttagtagagatggggtttcaccatgttggtcaggctggtcttgaactcctgaccttgtgatccgcctgcctcagcctcccaaagtgctggaattacaggcgtgagccaccgcgcccggccgctaatatttcaaattcaaacttcaagtgagtggttatttacatgaaaagagacatacattagaaagagaatgaaattgctatgattctaggggaaatgtaggttaaggaaaagtagaaaacattcagaaagctggataacccatagccctggttcctccccatgctctgaagctagcaggggcaaggttccctggcctcctcagctggggccgagcagaagggagagaagccgtgtgcaggtgggtgaagttggaggagagctctgcgtgcctttgcagattgctttgtttttgtgagatgctgtcacagccacatgtgaagctcttaggccacatggcgctcttcctgtcaccaccaaagtcacatgctcacaggcacactcaggagggagttagggtgctggccagcccaggaggggtgtctggccatctgccttgtcagcattcctgttttagattgtttcacgctttaatcagctttttgttttttattcagcaaacatttgttcagtacctctaaggattggcctgtgcttgtctgggacacgggaggccaggggacagttttgatttgtttcattgtgatagttcatgtgttgtgatagccagcagaatatatctaggacagtgtcgggcatacagtaagctgctattattaccagaaatgtcaaataacattaaaggaaaatgcaggtgttttacatgtatgaaaaggaagcataaggccgggcacggtggctcacacctataatcccaacactttgggaggctgaggcggatggatcacttgaggtcaggagttcgagaccaacctggccaacatggcgaaaccccacctctactaaaaatacaaaaattagccaggcatggtggtacgtgtctgtaaacccagctacttgggaggctgaggcaggagaattacttgagcctggaaggtggaggttgcagtgagccaagattgtgccactgcacgtctagcctgggtgacagagcaagactccatctcaaaaaaagaaaaaaaaagaaaaggaagcatagtttaaaaatgatggagaagcactcactggtccttaggataaataggccagcctggccccaggtagctcccatccaacaaaggtagcagatacacaaatacagagtcgtgggcaaacatccctaagtggagagacacagtcctgggggttcctggcgcttctctggagtagggctttgggcaggaacacttcagaggagggctgtgttcatctagcctttcacacacagatttagatggttctctagatctgaatctagaggtcaaacagaacaatgatttggcagacagacagagagaaatactttcaatccaagactgggcatggtggcttacgcctgtaatcctagcactttgggaggccaatgcgggcagatcgctagagtccaggagtttgagaccagcctgggcaacatggtgaaaccccatctctacaaaaaatacaaaaaaaaaaaaaaattagctgggtgtggtggtatgtgcctgtagtcctagcctcttgggggcctgaggtgggaggattgcttgagcctgggaggtccaggctgcagtgagctgtgattggctgctgcactccagcctgggcaacagagtgagaccctgtctcaaaaaaaagaaagaaatactttgaatcccatggaggatatagagaagttgtggacacactcctcctttctgccatgttcctctgggtttttgtgtggtggtaacatgagagtgttttctggctgatttgggggtgtgtctccagaaggtgatgaagctaagatgataaaaaaacaggatttcttgacaatgataacaccactctttcatggactttcattgtgccaggggcttgacccaggctgtgtattttaacaaccacctggggagcttggggaactccagttatagcagactctctggggtggggcgcaggcatcagtatagttacaactcctcaggcgagtccagcatgcacctggacctgagagccagcggagagaggggccgggagagaggggtcagtgctttcagccacagggttacttcatcatggacttcagctttcatgtagcttaaaaatctagagaatatttcagtgtgaatttgggggaaaaaaatagtaaagaaaagtctagaaaatagcttaaataacaaacacgtgtggatttgttagaccaagagcaagggagaccatttaatgcagttatttaacaatatttagtactttcctttaccttgtctgctgtgccatcattcatgcctgtcagtgttaaaaatccccaaatttcccaaacagattttcatttcacttccgtcaacttttaaattaaagtttttaaattcctgtccccactcccctcctagctcctgggccaggtcctcttggctctactcacattattcatagtaatatcttggatgaaaaaataggccaggcgtggtggcttacgcctgtaattccagcacattgggaggctgaggcgggtggatcatttgaggtcaggagtttgagaccagcctggccaacatggtgaaaccccgtctctactaaaaatacaaaaattagccaggcatggtgatgcgtgcctgtaattcctgctacttgggaggctgaggcaggagaattgcatacccagagctgagattgcaccactgcactgcagcctggatgacagagcaagactctgtctcaaaaaaaaaaaaaaaaagaaaaagaaaaaagaaagcccgaagcttcaatttgcaactgaaacataactagaaaaaataattatgaatttaaaaataactacagttattattattattaattattatttttgagatggagtctcactctgtcacccaggctggagtgcagtggtgcgatctcagctcactgcaacctctgcttcccaggctcaagcaattctcctgcctcagccttccaagtagctgggattacaggcatccaccaccacacctggctaatttttgtatttttagtagagacggggtttcaccatgttggccaggctggtcttgaactcttgaccttaagtgatctgcctaccttgtcctcccaaagtgctgggattataggcatgagccactgtgcccagctattattattatttatttgtctttcttttttttttgtttgagacggagtctcgctctgtttcagctctgcaccggggtgcagtggcgcaatctcagctcactgcgacctctgcctcccgggtttacgcgactctcctgcctcagcacccccgagtagctgagattacaggtgtgcgctaccacgcctggctaatttttgtatttttagtagagatggggtttcaccatattggccaggctggtcttgaactcctgatctcaggtgatccacccgccttggtctcccaacatgctgggattacaggcatgatccactgttcccggccccaactattatttaaaaaaattttttttttagttttatagagatggggtctcattctgttgcccaggctcgtcatgaactcccaggctcaagcagtcctcccatcttggcctcccagagtgctgggattataggtgtgagccactgcgcccagccattattttcctccatgctttgaatggtactttttctaaattttctgatgtacagtgggccagccctacctgtaggccctgacatttatgatctattgtcatctttatagttcttatcctataaaacaggcacattagcttctttctgtagaaatgggtgggaggatattcgaaatgcctgaccactggaacacggtggctcttgtgaccctccaggtccagaggggatgctggctggacctctggccagcctgttcttgtgctacctgcctgctgagtgttaacccgggaaggggcggggttaacaaggctcagaggtaacaggttttcctgattaaatcaaacatgatcttgcagcctgtattttctgggttttgtcttggtttgttaagatctatccacctccagagctgccaagagactatcgaccagtgcattatttcagacccatggtggccgccacctccgagaactcacacttactgcaggtattatcagagtcagctggaaaggcaacgcctgacccagggacacacagtaagcaccaactgaatgcctccaaacgggctgagttgcttggagagacgcctattcaaggtatgtgccatggagaagacggaaatcatttcacataattcgagttatcaaaatcaaaatggaaagttgttgttttcccactgaagttttttacatgaatttgtattcccaaactgtggaaataccactatttattgtaaatggcatacataatagtgtgcatatcttttacttctttttttaagttttatttttaaacttatttattttgagataatgtctaggtctgtcacccaggctgaaggcagtggtaactctctataacctggaactcctgggttcaagcgttcctcccacctcagactcccatgttgctgggactataggcatgtgccaccaccacacctggcacattttttaaatagagatgagggtctcactatgttgcccaggctggtctggaacttctggcttcccaaagtgctgggattacaggtgtgagcctctgcgcccagccaaggcttgtttttccaccttcagtttggttgatgtcattcaaatcacaacttttgttgtaagctcagctgttttcagacttgtcataattatcagggaatgtggttaaggtgccttccccttctctgcacagcctgggagagtatgttttcttcctcctggggatcgcattgtgtaactcttctcccgaaagtctgaaagggatgaatgtgtctgaaagtctggaaagacatggagaatcccctgcagggtgcagcaggaaagtcccaccatgagaggtggacttggactcttaggggctcgggtctcactgccatggggaactcaataggtgtctcgtataattggcaaacagaacccttggttccccacccccatcacacactgcgcttcctcatctaagtcttctcatctcaggaagtggtgccaccatgatccactgctcggaccaggatgtaggaggcctaattcttttttttttcttaatttttaatttttatttttttttattatactttaagttctagggtacatgtgcacaacgtgcaggtttgttacatgtgtatacatgtgccacgttcgtgtgctgcacctattaactcgtcatttacataaggtatatctcctaatgctatccctccccgcttccccgggaggcctaattcttagctcctctcttttcggtcctcccgcaccctccctgaccctccttggcccttagtgagtcctctcggctctacccacacgtgtgggggttctgtccactactcatctgcatttccgtggcctcccgggtctgagccccacccctccacctggaccgttgctgcagtctccttggtggtctccttgtttcctgtccatctcccgtagactgttcccctcaccagcagctggatgaggccaactataccagccaacacctctcccacctacagaaacctccaggctccccacgaggccctgtgcggccccgcccctgcccgcctttcaggctgcaccatccaccaccttcccttaccctcccacagtgtagcgtcttcctcctcctttcctcccctggaacacgccgtcatccatgacactgcctaagggcctttgtgtttgctgtacctccctttctgttcttccctcatatttttgtgaatctggctctttttttttttagcttatgacttatctcgaatgttactttcttccagccttccccgaccaccatataatctggttatctgcctgtcccctctaccagcccgctcacacaagcccccctcagtcacatcgtcctgtttttttcatagccctcctctattgagggccagcgtattgctcctgggcttctttcgtgtctccactgccctccaagctcctgggccaggtcctggcatagagctggcactcatgagtgtttgtcccattggtgagggcttgctggggagctgtactcggaaccagggctagtggtggtggactgcaggtctggagccggggatgtcaggttccccatcctggaatcactcacgtgccctgtaagtgtgcatgtattaacttccatttttgctgactataaaacaggaatcttggctggacacagtggctcatgcctgtagtcccagaactttgggaggccaaggtgggatgatctcttgagcccaggagttgagaccagcttgggaaacatggcgtaatcccgtctacaaaaaatacaaaaagtagtcgggcatggtggtgtgtacctgtggtcccagctactcaggaggctgaggtgggaggatcacttgagcctgagaggtggaggttgcagtgagccatgatcacaccaccgtactccagtccaggtgacacagcgagaccatgtctcaaaaaaaacataggaattggccaggcgtggtggctcacgcctgtaatcccagcactttgggaggccgaggcgggtggatcacctgaggtcaggagtttgagaccaacctggccgacatgatgagaccctgtctctactaaaaatataaaaaattagccaggcattgtggcacatgcctgtagtcccggctactcggtggggatgagacaggagaattgcttgaacccaggaggttgcagtgagctgagatggtaccattgcactccaggctgggcaatagagcgagactccatctaaaataataataataataagaagaagaatctcaatttttatcactgtctagtccacagggacatattaatataaatgaaacactaaacataaaatcctcatccccaattatgtaaatttgtgttattgaaatgtatgtacagagaaacgtaaatgtggttgtctcatggctcttttcatctcttctaattactgtttttatttaggttcagctacttcagtgttagaatttctgtcccaaaaagacaaagagagaatcaaagaaatgaagcaggcaactgacctgaaagcagctcagctcaaggccaggagtctggcccagaacgctcagagcagcagagcccagctctcccctgcagcggctgctgggcactgctcttggaacatggcattaggtggtgggacggccaccttaaaagccagcaacttcaagcctttcgccaaagatccggaaaagcaaaagcgatacgacgagttcttagtacacatgaaacagggtcagaaaggtgggtgctgggcctgggtgtcccaaatctcggcccgggcggggtcatattctcactgttctcatcctagacccatatttacagttgaggtatcctgttctgtcagtgtttttgctttatcctgctgcaaatagtgcaaaggtttcaggccttggctcttgacctcagaaagcaagaacagttggcttatgttcctccatatctcaggccaaagctagctgtttaagtagagaacacagctggcggtggccggtacttacaggccgtttggtgtttgcaagtgcttgactgctacaagcattgcattcacatttcatatcagcatcatcttccacctcatccgaagatcctaaccatccattcctgactcatagtctaaaatatgacttaaaacaatagttagctattgaaccgttacagagggaaaacaatcactttgtgatctgtgaagtaaatagggcaagaatgaggcaagaatgaggaaaggggttgctgttgtatgcagtagtcctcgtgagaggttatcagtaaattacagggttgttttttaaaaacagatctttgcggaatgtaaagtctatttactgtgccttaactctctactaagaacctacatcactaatgtttatttgctttaaaaaaaaaaaacggttagtgaaagagtgtttttctgccaaaacatagggatgtggttgaggtgaacttatcactgcctgggagtggtgacaagttccttactgctgaagatttaaccaaccattagcctctcaaatggttttctctgttatgtttggtagacagaattcaataaaagcatcattttggctggggatggtggctcatgcctgtaatccaagtactttgggaggctgagatgaggatcgctttagcctaggagttcaagaccagcctgggcaacatagtgagatcctgcctctaccaaaaaaaaaaagatatatatgtatatataaaatatattatatatatatatacacacatcatattttatttatttttttgaacggagtcttgctctgttgcccaggctggagtgcagtgtcaggatcttggctcactgcaatctcagctcactgcaacctccacctcccaggttcaagtgattatcctgcctcagccttctgagcagctgggactataggtatgtgccaccacgcctggtaattttttgtttcccgtctctactaaaaatacaaaaaattagccgggcatggtggcggacgcctgtagtcccagctactcgggagactgaggcaggagaatggtgtgaacgtgggaggcggagcttgcagtaagcagagatcatgccactgcactccagcctgggagacagagtgagactccatctcagaaaaaaaaaaaaaaaaaaaaagagagatggggtttcaccatgtttgccaggctggtcccgaactcctgacctcaagtgacccacccgcctcggcctcccaaagtgctgggattacaggcatgaacaactgcgcctggcctaaattttttttaaaaaagcacaattttgaaggaaacagcaatattacctgccaaatacctcaccattcccatagtcataaaaacaaggataaggacttatgaaatatacagggatacagtggtgcccagcagatgttctcttgtaagccccatgttttcctgaaaagtgaagctgcttcttgttctctgcccccgcagatgctctggaacgctgtctggaccccagcatgacagagtgggagcgaggccgtgagcgggatgagtttgcccgggcggccctgctgtacgcatcttcccattcgaccttgtcctccaggttcactcacgccaaggaggaggatgactcagatcaggttgaagtccctcgagaccaagaggtctgttgtcaccatgtcccttacctggtgaactttaatattaaagcactgcctagccaaaatagttttttccttttttttgagacggagtctctctctgtcgcccaggctagagtgcagtggtgtgatctcggctcactgcagcctccgcttcctgggttcaagcgattctcctgcctcagccttccaagtagctgggattacaggcgctcgccacaacagccatctaatttttgtatttttagtagagatggggtttcaccatattggccaggctggtcttgaactcctgacctcaggtgatccacccgcctcggcctctcaaagtactaggattacaggcatgagccaccatgcccggccgagccaaatatttttaatcccttggtgagaagatcaaaatatacatgtataggagaataggaaaccattttatgccttagtttccaatgtactggagcataaatgttatagcacaaacttttttcacagttctagaagattgcttgaaaattttaaatgggagagcagtcaggtcagtggtgcggccacttgatggaacagaatgcatgtctttttccagaatgatgtcggggataagcagtcggctgtgaagatgaagatgtttgggaagctcacccgagacacgtttgagtggcaccctgacaagcttctatgtaagagatttaatgtccctgacccttatccagagtaagttggataaacctttacatcagtacaaaatgtattcttgatattaaagctaattttccccttacatactcatataaattcttattttttctacatgaacttatttgcatatcactggatatacaaatctacacattttatagatttgctttgataaattacttctataatttgttactaaaacaaaatctggatagcaaactttattccatattgaagctatgaaactcagatatgtcaagttacaaaagcattatgcctctctcatttgccaccttcttgttgctgctcatgtggtttacatttataatgttacttatgtttttaaattatcattataaaagttaaacactttcttatttgattaataacacttcaagaggtggggtgtggtggtgcacacttgtaatcctagcttgggaggccaaggcaggaggatcgcttgagcccaggagttcgaggccagcccgggtaacatagtaagaccccatctctaaaaaatcaaacaaacaaacaaacaaacagaacacttcaagatagtaggccgggtgcaatggctcacgcctgtaatccctgtattttgggagactgaggcaggcagatcacttgaggtcaggagttcaagaccagcctgaccaacatggtgaaaccccgtctctactaaaaatacaaaaaattagctgggcgtggtggtgcgtgcctatagtcccagctatttgggaggctgatgcaggagaattgcttgaacctgggaggcggaggttgcagtgagccaagattgtgccattgcactctagcctgggtgacaaggcgagactcaatctcaagagaaaaaaaaacaaaacaaaaagatagcatatgtggtcaaaccagagactgtcagaaactttaggtatatttttatcagtggagcttttccttaatggaaatccattttgaaagttaaattcttgtccttatcataataaggaaaatctcatgggacctaaaatcagtcacccagattctcgaactgctttgagaagtgaaagcatcttaggagactttttagtcatgcagaagaggtggaaaacttgagatggaaagcttttcaggaggtggattttgtcctactggttgttactaaaatgattcttttttcaattcccagttcaactttagttggcttaccaagagtgaagcgtgacaagtactcagtcttcaactttctgacgctcccagagacagcttccttgcccaccactcaagcatcaagtgaaaaagtatcacagcaccgaggtcccgacagtgagtagggcgtccccggggtctctgattgaccagggcctcaacccctagcctgtaggaagacagaattaaagggtagtttagtcctaacaatgtgaatggtgcatattctccctccattgagggaattactcttactaataacttagctcatgttgtaatggtccagatgtttactctttggggttggggctctgtctctgcctctgccacctacctccccaggaccctacacagtgccaggcccctagtaggcacgctgacattctgagtgaatgaaagagcagtggtgaagaactggccttttccttgctaatgctggagtttatatctatgtcctgcctttcagaatcaagaaaaccatccagatgggatacctctaaacacgaaaagaaagaagattccattagtgaatttttaagtttggctagatcaaaagccgagccacctaaacaacagtccagccccttagtaaacaaagaggaagagcatgcaccagaattatccgcaaatcaggtatttggggcttccagattctctttgccacgctgagtgtggcccttgcttttctctttggtgacactttctcctcgtgactcaccagcagaggcagccaactattgatccatttccccttaaaggccatttggcttgtttctaacttttggctataacaagtaaagctgctgggagcattcatgtgcaagtttttgtgtgaatataagttttcatttctgtagagtacaaacctagtagtgggaatcctggaaaatatgtacatgtatatttaactttataagaagctgtcaaactgtattccaaagttatttttgccttatgtattttgaagtgcacttcttaggtgtatatacatttaggattgctatttctctctttttttttttttttttttttttgagatggagtcttggtctgtcccccaggctggagtgcagtggcatgatttcggctcactgcaagctctgcctcccctcccgggttcaagtgattctcctgcctcagcttcccaagtagatgggactacaggtgcgcaccaccatgcctggctaatttttgtatgtttagtagagatggggtttcaccatgttggccaggctggtcttgaactgggattgctatttcttttcagtgaattgatctttttttttttttctctgacaccggcttttactctgtgcccaggctggagtgcagtgttgtgataatggctcactgcaggctcgaacgcccaggttcaagcaatcctgcctcagcctcctgagtagttgggactgcgggcacacaccaccatgcctggctaatttttttttttttttttttttttttttttttcagagaaagggccttgctatgtttttccaggttggtctcaaacttctgctctcaagcagtcctcctgccctggcctcccaaagtgctgggattacaggcgtgagccaccatgcccagttgacccttttaacattatgtaatatcatctttatccctggtaattttctttagtgtttgcgtagtatatatctttttcatcttctttttaacacatctgtttcattatatttaaagtgggtttctttttttttttttgagatgaagttttactcttcttgcccaggctggagtacaatggcactgtctcggctcaccgcaacctctgcctcccgggttcaagcaattcccctgcctcagcctcctgagtagctgggattacaggcaggcaccaccatgcctggctaattttgtatttttagtagagacggggtttctccatgttggtcaggctggtcttaaactcttgaccttaggtgatctgcccgcctcagcctccccaaagtgctgggattacaggcataagccaccgcgcctggctaaagtgggtttcttataaacaccgtgtcactgagtctttcttaaaatacattttgataatttatattggacatttgcatttaatgtgatcatggatatttttggatttacgtgtatgatgttatattttctgtttattaccactcttttttgtttctttttttccccttctctgccttcttttggattacttgaataatttttatattccatttgaatttttctattttttttctcttggtattttttttttagtgattgctctagggattatagtatacctacttacctttttacagtctactgagaattaaatgttttaccacttccagtagaatagagaagctttagcactatgtaggtccttttactctcctccctctatgctgtcttacatattacatgtacacacaatgaaaatgccatcaaaccagtggtgatcatttttgcttttagtcattaaacatattttaaaagaaccgatgcagagacaatagcctactctgtttaatcagatattttctatttctgttgctctttcttcatccttgaagttccacgttcccctcacctatcatttctgtctgaggaacttcctttagcatttcttttagaccagttccaacaagtgattctcttaaattgccattatctgagaatgtcttatattttgtcttcattcctgaaggatgtttttgctggatatagaattctgggttgataatttttgttttgttttgtttgtttgttttttgagacggagtctcgctctgtcacccaggctggagggcagtggcgcgatctcagctcactgcaagctccacctcccaggttcacgccattctcctgcctcagcctcccgagtagctgggactacaggcgcccgccaccacgcctggctaattttttgtatttttagtagagacggggttttactgtgttagccaggatggtctcgatctcctgacctcgtgatccacccgcctcggcctcccaaagtgctgggattacaggcgtgagccactgcgcatggccaatttttttttaaattaaactgctacttcctccggggtttcgtgatttctgatgagaaatcttcaaccattcaaattgtcctcaggctgggtgtgttggctcacatctataatcccagcactttgggaggctgaggcagggggcttgtttgaggctaggagtttgagactaccctgggcaacatcgtgagaccccatcttttacaaaaaattaaaaaactagttgggtgtggtggcatgcacctgtggtcccagctactcaaggggctacggttggaggatcacttgagcccaggaggtcaacactgcagtgtgctatgatcgcaccattgctttccagcctgggtgacagagtgagaccctggctcaaaaaaccccaaaacaaattattattcctctgtacataatgatgtgatttttctcctagctgctttcaagatttttacttggtctttggattttagcggtttgattatgatgtatctgggtgtgaattcttttgagtttattttgtttggggtttgttaagttgcctgaatctgagtttggaaatagaacagaggcacagtgctctactgcatttttggggatcctagtagctgggattacagacgcccaccaccatgcccagctaatttttgtacttttagtagagacagggtttcaccattttggccaggatggtctcgatctcctgaccttgtgatccacccgcctaggcctcccaaagtgctggaattacaggggtgagccaccacgcctggcccggttttgcttctttgacctcatcagcacattgtacagttgttgactcggaaacaccacaaaaatagaagctatgtgagtgatcactgtttagttgggtggtgtgtggctatggatacccatgtacatgagcataaacataaatatgtgtgtctgggagtgtattctagaatgtctcctcccttttacccttgcctctgtatccctgactcttatttcactgtcaatacagaccgtcaacaaagatgtggacgcacaggctgaaggagaagggagccgcccatccatggacttattcagggccatctttgccagttcctcagatgaaaagtcctcatcctccgaggatgagcaaggtgacagtgaagatgatcaggcaggctctggggaggccaacttccaaagctcccaagacactgacttgggggaaacatcatctgtggctcacggtatgtcagtatttcagactcggggatctaaaggagaagacaatgactctaggacagctgcttctctgtttactctataatcttaaacccgaatgattagcaatcaatgatatgtaatcttttatatgtatataatttttttttttttttttttggaaacaggatctggctctgtccccagggtggagtacagtggcgcaatcttcggctcactgcagcttccacctcctgggctcaagcaatcctcccacttcagcctcctgagtagctgggactacaggaatgtgccaccacccctggctaatttttgtatttttagtagagatggggtttcaccatgttggccaggctagtctctaactcctgacctcaggtgatctgcccacctcagcctcccaaagtgctgggattacaggcataatcccagtgcccggctagttttccagacttttaaaatttttatatctcttctatctgaatatatagtaatctgcttaaaaaacaagattattaacgtgaatatgatcatttatcttcaaggttttttctttgataatttattttgagtgaaacttgtctcccgcagttctctgtgatgggacatacatagtcttacattcctgatggtttgtaagattttccttctcagatggccctttcttggggacacatttctacttttcaggtcttaggggcgctaggctacgtgcccacgggtgcacttggcacgctgtacctcagccattgctgcccttggttgcaggtgccctcgtgtgactgacttccagctctggagttcacaagggcagcaccggggtctgcgtgttcactgctgcatccttagcacctggcaggagtgaagtggtgtgggcaagcatatgttatctggtggcaaaagacatgaatgaaagactcagagacattaacatggggcagacgaatgacatgaacaccccgctgtttttcagctcttgtgccagcaccccaggagccgccaccttccttcccgatacaaaagatgcagatagatgaaagagaagagttcggcccgcggctgcctcccgtcttctgccccagtgagtgcagagccctttggttcgcccatttttatcagtgtgtgattgccctgagatggggacagtgtgacttagagccgaccaaacatacgtgcttgcttctggtttatatgttttcagtcatattttaaacccgttgtctccacctagtgcctgaaatgatagttgtttctatacaccttcagagacctccaaactttatttcctttacctgccacatgtttacaggagggtcctaagtatcttaagttttgttatagaaatataagtttcccaacagagcttaaagaaaaagagcctggccgggcacagtggctcatgcctgtaatcccagcactttgggaggccgaggtgggcggatcacgaggtcaagagatcgagaccattctggccaacatagtgaaaccccgtctctactaaaaatacaaaaattacctgggcgtagtgacgcacgcctgtagtcccagctactctggaggctgaggcagaagaatcgcttgaacccgggaggtggaggttgcagtgagccgatattgcaccattgcactccagcccaggtgactgagtgagactctgcctcaaaaaaaaaaaaaaggggctgcagccaggcacaatggctctagctgggctggtggctcacacctgttatcccagcactttgggagggcgaggtgggaggattgcttgaggtcaggagtttgagaccaccctggtgaatttggtgaaagcccatctctactataatttttataaaaattataaaattttataaaaatataaaatacaaaattatatattttatatataaaaattatatatatttttatattttataaattttatatattttacaaatttatatattttatatatttatatattatattttatatattttatatatttatatatttatatatttatattttatatatttatacttatatatatataaaatataaatttaaatatttaaaataaatatattttaacttaatttaaatatatttctaaatatatttaaataaaatatgtaaatatttaaaataaatatatattcatatataaatacatattaaaatatattcatataaatatatatatttagatattttataaattttaatatatttttataattttttatatataacaattatatataaaaattatatataaaattatatattttatacataaaaatgatatataaaattatatataaaattatatatttttatacattaaaattttataaaaatataaaatataaaaattagccaggcatggtggtgtgtgcctgtaatcccagctagtaaggaggctgaggcaccagaatcatttgaacctgagaggcaaaggttgcagtgagccgagatcgagatcgcgccactgcactccagtctgggtgacagagcaagactctgtctcaaaaaaaaaaaaaaaaaaaggtaaaagaggctgggtgcggtggctcatacttgtaatagcagtttgggaggccaaggcagacagatcgcttgagcccagtagtccgagacaagcccagcctgggtgacacagggagacccatctctatttaaaaaaaaagggtgggcacggtggctcacgcctgtcatcccagcgctttgggaggtcgaggtgggcagatcacgagatcaggagatcgagaccatcctggctaacacggtgaaaccccatctgtactaaaaatacaaaaaaattagccggacgtggtggcatgtgcctgtagtcccagctgctggggaggctgaggcagaagaagggcgtgaacctgggaggcggagcttgcagtgagccaagatcgcaccactgcactccagcctgggcgacagagcaagactccgtctcaaaaaataaataaattaattaatttaaaaaaaattaaaaaagaaaaagagaaattaaaaaaatagtatacaaaattggaggggaattgcaagaagagtatttaagactaatatatttttaaaattttatttatttatttatttatttttcagacagggtctcactctgtcacctaggctggagtgtagtggtgctgtcatagctcactgcatgacttctgggctgaagtgatccacccacttcaacctcccacagtgctggaattacaagcgtgaaccactgcacgcagccaagcctcctttttttgtctttttctttttcttttcttttcttttttttttttttttgagatggagttttgctcttgttgcctaggctggagtgcaatggcgcaatctcggctcaccgcaacctccacctcctgggttcaagcgattctcctacctcaccctcccaagtagctgggattacaggcatgtgccaccatggctggctaattttgtatttttagtagagatggggtttctccatattggtcaggctggtctcgaactcctgacctgaggtgatctgcccgcctcagcctcccaatgtgctgggattttaggcgtgagccaccgcacccggccgccaagtctcctttttactttagctaatgtagcaaatacaataaaatggtcctctcagaagtaaatacaatctatcccccattctgttccccaaatatctgtcaacaacttccatttagttgcatcttaaattggcatttcaagttaaaacatttacactggtttatcatctctttgagggctgggtttacaaacatctataacatggcccagatatataactaacataaaaatatcattattcactttatagtttctcatggtgcccatatgtgaatactggtttgattagctaactgctttcaaagacaggattaaaaagcagagaaaaaaagtatgaagttttgacaaattgcagtgaatgtatttcttatttgctatagttgttcagcacttttgttttattttgttttgttttgagacagagtctcactctgtcacccagtctggagtgcagtggcgcgatctcggctcactgcatcctccacctcccaagttcaggtgattctccttcctcagcctctggagtaactgggattacaggtgcctggctaattttttgtatttttagtagagacggggttttaccatgttggtcaggctggtcttgaacttctaacctcaagtgatccacctgcctcagcctcccaaagtgttgggattacggtcgtgagccactgtggcctggttgttcggccctttagtttcttttttttttttttttgagacggagtctcgctctgtcacccaggctggagtgcagtggcgcaatcttggctcactgcaagctgcgcctcccaggttcacgccgttctcctgcctcagcctcccaactagctgggactacaggtgcctgccaccacgcctgcctaatttttttatttttagtagagatggggtttcaccatgttagccaggatggtctcgatctcctgaacttgtgatctgcccgcctcaacctcccaaagtgctgggattacaggcgtgagccaccacgcccggccggctctttagtttcaaactggtatcagcacttgaaagccaagtcttttatgtccctttaccataatgtctttgataccctcgtaatagtgacttaatttggtctatgggttatttagggaaatgatttttgaaaaaaactagtgttaaaaaaaagttttgggctgagtgcggtggctcacgcctataatcttagcactttggaaagctgaggtgggaaaattacttgagtctaggagtttgaggccagcctgggcaacatagagagattgtatctcttaaaaaaataaaaaagaaaaaaattagcctggtgtggtggtacatgcctgtggtcccagctactcaggaggctgaagtgggaggattgcttgagctcaggaggtggaggctacagtgagctatgatcccactgctgcactccagcctgggtgacaaagcgagatgctgtctcaaaaataaataaataaataaataaataaataaataaataaataaatagctgggcacggtggctcacgcctgtaatcccagcactttgtgggggccaaggtgggcggatcacctgaggttgggagtttgggaccagcctgaccaacatggaaaaaccctatctctactaaaaatacaaaattagccaggcatggtggcacatggctgtaatcccagctacttgggaggctgaggcaggagaatcgcttgaacctgagaggcagaggttggggtgagctgagatcgcaccattgcactccagcctgggcaacaagagtgaaactctgtctcaaaaaaaaaaaattaaaagaattttggaaaaaaaaaaagttttgggaggttgaattttgaaaaatctggttgggcatggtagctcacacatgtaatcccagcactttgggaggctaaggtcagaggatcccttgagtccaaaagttcgataacagccttggcaacatagggagactctcacttccacaaaaaaattaaaaaattagccgggtatggtggtacatgcctgtagtcccagctactcgggaagccgaggtaggaggatatgtgaaccgaggtcaaggctgtaatgagctgtgattgcaccattgcccaccagtctgggagacagagcgagaacctaaaaaaaaaaataaataaagaaataggactacaaaattgcaggcatctgttaactgagttgagaaaatattcacccttacaaaacatcttgaaactttccttttttttttctttttttcttttttttcttttgagaaggattcttgctctgtcacccaggctggagtgtagcacgatctcggctcactgcagcctctgcctcctgggttcaagtgattctcctgcctcagcctcctgagtagtggggattacagatgcatgccaccacgcccatctaatttttgcatttttaatagagacagggtttcaccgtgttggccaagctgattttgaactcctgacctcaagtgatccgcccacctcagcctcccaaagtgctgggattacaggcatgagccaccgttcctggccgaaacttttctttaggtgaaaaaaattgatttaatgcctttcactgcttctactattgtgaaattttgttgatttagttacccagaaattaatgacctatgaaaacattttggtctgaatttggagatggagaattgaggcacatgcaaattctttaatgatttttaatgattatatacattattattattttttaaagttaggtagagatagggtctcactatgttgcccaggctggccttgaactcctgaggtcaaggatcctcctgcctgggcctcccaaagtgttgggattacaggcatgagccaccgctcccagcccattatgttgttttgatggtagttttttcagtgtttccacttgtaagacaaattcttataaaatacgtttttgtagagagaggaggatataagaagagctaacatttaggtgccagattctgagcttcgagaatcatggacatggccctgtctagtctagtctgtgtccctaaaaggattgggattcttattgtccccattttatagttggggaaactgggcgtgggagaggttaggcgacgtgtcgaagatcacagtgctggcagcagagctgagttccaattttggtctgtttctgagcttatctgatgatgttggattacaaaaggctttgtgggctttctggtccgactttatctgcatctggcagctggggtcacggcaggatactgattggatcacacaggtctttgttgaggtctctgacagctttctaagtacaactctgcaaggtggtgtgctaatctgtttctcagtgaggcagaagctaatccaagggcaggagttcttcctcagtgttaaacattccatctacactagatgcctgattcagcagtttaggagcttagttttggatagtctttgttttcgtgctatataggtcctgtgtttattacctttgtgtttcagatgctcgtcagacacttgaggttcctcaaaaagagaaacataaaaagaacaaagacaagcacaaggccaagaaagagcacaggcggaagaaagagaaggtgagagacttgtgtgtaccccaggatcagtgtggggtgggacccgctggtcagcccccaggagtgtcatatactgcagctgaagagcggatctggtggccaagtcacagttctctctgagacttaacagaaatgttgacattcaattcaaatgcttgatttttcagaaacattttcttttgcacttaaacgcccccccgctttttttttttttgagatggagtctcactctgttgcctagggtggatggagttcagctgcaacctctacctcctgggttcaagcaattctcctgcttcagcctcttgagtagctgggaccacaggtgtgcaccaccacacccggctaattttttgtatttttagtagagatggggtttcaccatgttggccaagctggttttgacctcctgacctccggtgatctacctcccaaagtgccgcgattacaggcatgaggcaccatgcccagcccttaaaaaaactttttttgtgaacattaaaaagcagaaaaaagggcatttagggatcttagagcaatgggtgaatattaaataataaaacaatttatttcttatttattcaatgttaagtgaaggtattattttcagcatttctcagctactttgtctttattagtttgagattttagtccgtcacttgccgtttgaagtaaaagaattcgaatggaaggcaggcatgtgctcccactgttgacgtctcttatttcatcaaccatgtcttcttttgggtttcagcacaggcttttaattaggttaatgttcttgttgggtacccaaagtagtctgggctaggtgctgaagaaattagaaacagtttccttactggccaccagagggaagcactcccacgtatggcggatgacgggcgttccctcctagtgaaaggaagaaaatgtgtgccgaccaaatctgtgtgtccttaccagtgtatctgctgttcggtaaccttctgccagtttcttccttgtggttttcctgggtgcccgtcatcctgacatgaagtttcccaggggtctgacaaaataaacaagtcaggttcaccggaggtggcacaggtcaccatgcataagatgtgtggtgtcacgtcttatgacaccaagtgttacgataggtcctgtctgcgccttcttggttctgctgtgtctgttgctggaggcgcagctgggtcagggtgcgcagttgagagtggcacagccgtctgccctgtgctgtcttgttaggctctcactctcactcactctaaatgaggtttaaacatttttttgaatgactccatcactgcagccttgttaacctttcattgtattgaattaaggaggaaaaaatacatttgttttcccccaccactatttgttttttacagaaaaagaaacacaggaagcacaaacacaaaggcaagcaaaagaataaaaaaccagagaaaagtagtagctccgagagttccgacagcagcgacagccagagtgacgaggaaaccgcagacgtgtcgccccaggagctgctgagacggtgggtagtgggagatggagggtttttcagaaacctttagaggcttattgagtgcttgatgtgtttgcttagaggcaaatatcagaaatgaaaaactggtaggccgggtgcagtggctcacgcctataatcccagcactttgggaggctgaggcaggaggatcgcttgagcccaggagtttgagaccagcctgggcaacatagtgagaccccagctctacaaaaacaaacaaacaaacaaacaaaaaacaaattagctgggcgtggtggtgcacacctgtgcctccagctatttgggaagctgaggtgggaggatctgttgagcccgggagttggaggttgcagtgagccactatcgtaccactacactccagcctgggtgatagagcaagaccctctccctaaaagaaaaaaaaaaatgtgtgtattaactaggctttttaaaaagtttgaatatctaattatgtaagtgatatgtgaatatattatcattatgaaaattcaggccaggcgcggtggctcatgcctgtaatcccagcactttgggaggccgaggcgggtggatcacaaggtcaggagctcgagaccatcctggctaacacagagaaaccccgtctctactaaaaatacaaaaattagctgggcgtggagcgtgtgcctgtagttccagctgctggggaggctgaggcaggagaatggcgtcaacctgggaggcggagcttgcagtgagccgagattgtgccactgccctccagcctgggcgacagagcgagactcttgtctcaataaaaaaaaaaaaaaaaagaaaagaaaattcagaccttacagccaatgcttaaaggagccctgactagttctccaaacctctactttctccacagtaacttctgccatcagtttcatatgtaacctttaagaccttttttgtgcaaccacacacacacacatacacactcacgtacatggatgcacatacacattgtttgtttcttttttagacgagtctcgttctgtcacccaggctggagtgcagtggtgcgatcttggctcagtgcaacctctgcctcccgggttcaagcagttctcctacctcagcctcccaagcaactgggattacaggcacccgcccccacacccagctaatttttgtattttgtatttttttagtagagacagtgtttcgtcatgttggccaggctggtctcaaactcctgacctcaggtgatacacccaccttggcctctgagtgccaggattacaggtgtgaaccaccatgcctggcctatatacagatttttgtgcacattttaaatataagtaatataattttatatagcatatatttatagggtatgaattttattttattttttgagacagagtctcgctctgtgacccaggctggagtgcagtggcctgatcacagctcactgtaaactctgcctctccggctcaagggatcctcccacctcagccttcagagtagctgggactgtaagtgtgcaccaccacacccagctaatttttttaaaaaatcattttttttgagacagagtcttgctctgtcacccaagctggagtgcagtggcgcgatcttggctcactgcaagctccacctcctgggttcacgccattctcctgcctcagcctcctgagtagctgggactacaggtacccgccaccacgtccagctaattttttgtatatttagtagagacggggtttcaccgtgttagccaggatggtctcaatctcctgacctggtgatccgcctgccttggcctcccaaagtgccgggattacaggcgtgagccaccacacccggcctaaaaaaatcttttttgtagagatgggatctcctatgttgcccaaactggtctcgaactcctggcctcaagtgatcctcctgcctcagcctcaggcgtgagccgctgcgcaggcctgctcttgccagttttatctttattgggaagaagggtgttgtgtgaattctttgagtgtctggcttctgagattccttcagatgatggtaggcagcagtgaggggcttgtagtcattgctgtggaagattccttcttgtgagcacaccacggtatgtttatctcttctgttgtgtggatactgggttttttactttgagtctgtggagcagggattttcagccagtgtgacccagctctgtttcaaatagaactgccacgaacattcctatatgtatgaaattcagatttaggccaggtgcggtatctcacgtctgtaatcccagcactctgggaggccgaggcaggcggatcatgaggtcaggaaatcgagactatcctggttaacacaatgaaaccccaaaccccatctctactaaaaaaactagccaggcgtggtggcacgtgcctgtagtcccagctactcaggaggtggaggcaggagaatcgcttgaacctgggaggtggaggttgcagtgaaccgagatcgcgccactgtactccagcctgggtgacagagactctgtctcaaaaaaaaaaaaagaaaagaaattcagatttaagactgacaacttgggggctgggcatggtggctcatgcctgtaatcccaataccttgggaggtcaagatgggaggatcgcttgagcccaggagttcaagaccagctcgggtaatatagggagaccctgtctctataaaaaaattaaaaaaaaaaaaaagacaacttggatgctttgggccctggagtgaatgtattttagttccttcccaagggtcatgcaacggatgcggtaggtgagtgaaactgagattaaaaattgcttgtattctcaaggctaaataagactagggaaaaaagttgcttttataagtggtcttaatacgaggtgtgggtgagtgagtctctgtgtgttttcagggtaatagaagaagcattttaagaacacagattggccgggtacggtggctcatgcctgtaatcccagcactttgggaggccgaggcgggcagatcacagtcaggagttcgaaacaagcctggccaacatggtgaaaccccatctgtactaaaaatacaaaaattagctgggtatggtggcatgtgcctgtaatcccagctactctggaggctgaggcaggagacttgcttaaacctgggaggcggaggttgcagtgagctgagatcgcaccactgcgctccagcctgggcgacaaaagtgagactccatctcgggggaaaaaaaaaaaaaagcacagattaggcagtacttcattgtgggttattgtgagtgcattttgtaggtgcagacatgctgctgtgatatggggaggcctggcattctcagcctccacggagctgtttggtttttcactttagctaactttccatttctctcttttctgttttcttttccaggctgaaaagtcttccactaagaaggcagtaattgaatgctgccctggctcgtcctagaatcatttctcctccatgatggaagcccagtgattgttcagttaacgcattgtacagagtgtatttatatgtaaattcctgctgtaaaataatttttaaaaccttgacatttcaaagactgccttgaaaggtcgcagaaattgatttctatttttaatttcagttagtatcgggggaaaaaaatccagactgaacagtttaattaaagtggaatttttctattttcttcttgatttttaaaaaatttcctgggacgttaaaaaagaagttaaaagtgaaggcttctctctggttttgtgatgaagacagcctggactcactgaaggacaagcgtgtgagaaggggcggttgcggcccctcctgccgttttttgggagtgaagctcttccctctctgggtggctgggttactgttggtgcccaggaagccccatgggagggcagagccagggcctggcagggggcctcagcctctcagggtagatgtcactaaagtgtctgagacaggcagggaaaccaggcaggagaatgtgcacccacagcctgggttacacggctgcagctccctgctctgaggccacctcatgtgtaccaaggagacctttttgaaaaataaagtgcagaccaggtgtgatggctaatgcctgtaatcccagagctttgggaggccgaggcgggaggattgcttgagcccaggaattccagaccagcctgggccacatagagacccctgtctccacaaaaaataaagtattgagcatttgtattttacattatgaaagtagcatcatagatcacaacaattttaaaagcagaaagaaggaagaggccgggtgcggtggcccatgcttgtaatcccagcactttgggaggccgaggccagcggatcacttgaggccaggagttcaaaaacagcctggccaacatggcgaaaccttgtctctactaaaaatacaaaaaaattagccaggtctggtgagcatacacctgtaatcccagctgtgtgggaggctgaggcacgagaatcctttgaaccctggaggtggaggttgcagtgagccgaaattgcgctactgcaatccagcctgggtgacagactcttgtctccaccaaaaaaaaaaaaaaaaaaaaagaaggaagaaaatcacttttagttttatcatccaaagatgacacccttcttcaatattttgaataattccaccctgtccttttctagctatggggctgttatctgactggtggtagcattttattccctgtcactgttgttggggttgtgacagatatttccctcatctattataaatgttgtaaacccacccctaataactgcatcttatttcatgcaggggctaccccataacttactgaccttttctgttttgtcatgaagtgggttggccaggagctgtacccaggcagaggacatgaagaaattgccctgtgacaggagccagggaaaccacagcggagggctggaggctggggtgctggttttgctggctcggcctggttcccagaatgcaaagcccatttttcttttttttgcaacctccacctcctgggttcaagccattcccctgcctcagcctcccatgtagctggaactacaggcgcacgcccccatgcctggctaatttttgttattattttttttaagtaaagatggggtttcactaaacctgttggccaggctggtctccaactcctgacctcaggtaatccgcccgcctcggcctcccaaagtgccgggattacaggcgtgagccaccgcgcccggctgcaaagcccatttttctataggtaacctgtgctgcgcggggtggcactagttttcacccagcgggcgaggaggcagcgaagtcgcgggcccagcgtagcgcgcgcctccgaagggcttggtgcgggcgcgggcgcgggcgcgcggcgccaccgttcccatccaggcttgtcggcggccaccggcggaccgggcttcgagatggcctccccgccgcggtgctccccgacagcccatgacagggaatgcaagttgccgccaccctccgcccccgccagcgagtattgtcccggcaagctgtcctgggggaccatggcgagggccttaggccgcttcaagctgtcgatcccgcacacgcacctgctggccaccctcgaccccctggccttggacagggaaccaccaccgcatctgttgcctgagaagcaccaggtgccggagaaattgatctggggcgaccaggaccctctctccaaggtcagaaccgccgctggggtgagggggcactggcctgttccccacacgggaggaaggcgctcgagctgtcgggggacccatggaaaacccacctggcttcaccaggacccccagcgaggccctaggcccatttccccatctgtggtacatctgtgggcaaaggtcagacccacctgagcagggcgtgctggggatgccggcgggggctccccgcactgccacctgctggggaaccaggactcttcgctgggaggaggctctgccccaccatgtgaccccatctagaccttggagtctccgtaggtaggcccacccacagtgatgctcctaattgcagcccaagggtcggtggctcagctctccccgtccaggagatacagttagcgtcagaagaaacgggaaactcagaataataataacaacaatgaattgggccaggcaaggtggctcacacctgtaatcccagccctttgggaggcccaggtgggaggatcacttgagcccaggagtttgagaccagcctgggcaacatagtgagaggtcgtctctacaagaaataaacttagcccagtgtgatggggcgcacctgtggtcccagccacttgaaaggctgaggcaagaggatcccttgaacccaggagtttaaggctgcagtgagctatgattgtgccactgcactccagcctgggcaacagagcgagactgtctccagaataaataaataaataaataaataaataaataaataaatatagagagagagagagaaagaaagaaagaaaaagaaaaagaaagaaagaaggagaaagaaagaaaaactggctgggtgcagtggctcatgtctgtaatcccagcactttgggaagccgagatgagcagatcacttgaggtcaagggttcgagaccagcctggctaacatggtgaaaccctttctctactaaaaatgcaaaaattagccaggcatggtggtgcgtgcctgtaatcccagctactcaggaggctgaggcagcaagatcatttgaacccgggaggcagaggttgcagtgagctgagatcatctcactccatctcaaaaacaaaacaaaacaaaaacccaataaagaacattctcaataagtagcgtttcatgcttggccttgatttattgcactcacatgcagatgtcagagtgtgtttttaataatttcctcgaaacctctgcctggcttcccagcatgtttaagatgaagtctggcgatctgcctgtggccttccaggccatttcaaatctggcacctctccatgttctcctcccccatccccctgtcttgctgacctacaagcaggtctggcctcagggatcttggcggttccctgcccccacggtattgcgctcttggggaggccctccctgaccgcccgtctaaagtagccagggccactgtctcctccgtgcctcatgccatggtctgacatccccgttccgtcctcaaggtgtcctctggctgccagcaactggcccctcgaggttagggactttgctcctaggtggctgctgagctgcagcatcaggtccaggccccatgggggaggaggctcttgaggtttatttgtggaatatgtgaatgaacgctacgcatagaagaaccgttttgtttttgctctgtcctctgcatgagctttgtcagcacctctgaaatgtactcatgtgttggggacttctctctgcagcccctgggacccctttacctagtggatcccaagggactgtgtgcagaaaaaaacctgaaacgagagccccagaaaagcctgtggtgggggtagcggaatggttcccccctcttgctaatgtttttccatgatggagttctaggttttttgttttcctattttttaaattaaattatatattttttaaattattaattttaattttgattttttttgtagagagggggagtctcgccatgttgcccaggctggtcttaaactcctggcctcaagcaatcctcactcctgggcctcccaaagcactggaattgcatgcgtgagccactgcacccagccaatttaatttcaatttttaatgatagttgggttttcctaatgagagagataacccaaaccctgcaggggcggcaggggctggggtcgccagaggcgggggcggtgcgggagggccgcgcaggtcatgtcccggggactggggccgctcctggggtagggagccaaccctgcacgcgcggccccggcctggcccgacggggttagcgaactcccccggagaaaagcccggtcccagctctccacgctccctggcaacggagcccgcgttccagtgtcctcgtgtccccgagccccctagaggcggggtatcatctcatcccctgcatctccacctgcacgtccccgacacccccccccccgccccgcatcacctgcaaccggaaggccaccgccgccctgaaccgtcgcatcccctcacccctgtcctcctgccaactcagcccagcaccctgacactgccttccaggccacacccctggtcttgcctccaacatttcccccacccccacacttccgcagctcaacctgggacgtgtcgccatgcgcgagctggggtgggtgggtggggggggtgacatcttcaggcttccctgctctgtcctctttttttccccccagttttactgagatataattcacgtaccatataatttaaccatagaagctgtagtggtttctagggtattcagagtactgtactccccagttccccaatacccatcctgccgacaccaggcaattctgctttctgtccatagatttgtctattctagaccttttatagcgatagaatcaagccatacgtggtctcttgtgactggcttcatttccttagctaacgtcctcaaggttcatccatgttgtagcctgtagcagtgctcccttcccttttcattaccaagtaatattctgttgcatggccatgacacattttctctttctttgagatggagtctcgctctgttgcccaggctggagtgcagtggcgtgatcttggctcactgcagcctctgcctcccaggttcaagcgattctccagtctcagtctcccagtagctgggcttacaggcatgtgccaccatgcccggctaatttttgtacttttagtagagacggggtttcaccatgttggccaggctggtcttgaactcctggcctcaggtgatccacccaccttggcctcccaaagtgctgggattacaggcgtgagccactgcgcctggccgaaccgcccgtttttcaaagtggctgcactactttacgttcctaccagcaatgtaggaggtttccaactattggcatccttgccaacacttgttatgggactttgatgatagccatcctaacaaatatgacacagtatcacactttggttttcttttctttctttctttctttcttttcttttattttttaagacgaagtcttgctctgtcacccaggctggagtgcagtggcatgatctcagctcactgcagcctctacctcccaggttcaagcgattctcctgccttagcctcccaagtagctgggattagaggtgcccaacaccacactcggctaattttttttttttttttgagatggagttttgctcttgttgcccaggctggagtgcaatggcacgacctcggctcactgcaacctccgcctcccgggttcaagcgattctcctgcctcagcctcatgagtagctgggattacaggcatgcgccaccatgcctggctaattttgtatttttagtagagacggggtttctccatgttggtcaggctggtctcaaactcccaacctcaggtgatccacctacctcagcctcccaaagtgctgggattataggcatgagccaccgtgcctggcctaatttttgtatttttagtagagatggggttttgccatgttggccaggctggtcttgaattcctgacctcaggtgatccgcctgcctcggtctcccaaagtgctgggattacaggcatgagccaccgcgcccggccacactatggttttcatttgcactttcctgatgtggtgagtcatgctgagaatcttttcatgtgctatcaactatttttattttttctttttgagacagttctcactctgtcacccaggctggagtgcagtgacatgatcatagctcattgtaacctccgcctcctgggttcaagcaattctcatgactcagcctcctgagtagttgggattacaggagcacaccacgatggctggctaatttatttatttttattttttattttttagtagagatggggttttgccatgttggccaggctggtcttaatctcctggcctcaagtgatccgcctgcttcagcctcccaaagtgctgagattataattgtgagccaccacatcccgcccttgcatatcttctttggagatatatctattcaaatcctttgcccatttaaaattttaatttttattatttaaaggcagggtcttgctctgtcacccaggctggagtgcagtgctgcaatcatagctcactgtaacgttaaccttctgggctcaagtagtcctcccgcctcagcctcctgagtggctgggactacaagtgtgagccaccatgcctggctcattttctttcttcttcttttttttttttttccaattttgtacagacagtctcactatgttgcccagactggtcttgaactcctaggctcaagcagtcctcctgccccagcctcccagaatgctgggattacagggatgagccaccgtgcccagccagaattttttttttttttttcagatggaatctcactctgtcacccaggctggagtgcagtggtgcaatcttggctcactgcaacctccgcctcctgtattcaagtgattctcctgcctcagcctccgagtagctgggattataggcatgcgccaccatgcccagccaagttttgtatttttagtagagatggagttttgccatgttggccaggctggtcttgaactcctgacctcaggtgatctgcctgcctcggcctcccaaagtgctgggattacagacgtgaaccacccccctggccagaattttttaaattcatttttttccgggtggtttattgcaagtgtttagaaatataattaactgttgtacattgattttgtgtcctgcaacatgtttagctcatctggtctctccttttttcagatcccatttaaaattctgagtgggcacgagcacgctgtgagcacctgccacttctgtgtggatgacacaaagctcctcagtggctcctatgactgcactgtgaagctgtgggtaggtggccggctgttaggtactcctggagcgaaaacctttcctaagcttaggcacctcctgtgtcgagttccccagcactgaactcacaggcacttgtgggtcctggtttgcaggtcttctgagcaaagtgccagaaggaggagagggtgagagcccagcctagacgaagttagggtggctgctgccagcttgcaggcctggaaacagtgggaatgggatggagacctctggactgagagtgccacacatttttttttttttttgagacggagtttcgctcttgttacccaggctggagtgcaatggcgtgatctcggctcactgcaacctccgcctcctgagttcaagccattctgctgcctcagcctcccaagtagctgggatttcaggcatgtgccaccacacccagctaattttgttttttgtttttttgtgttttttagtagagatggggtttcaccatgttggtcaggctggtcttgaactcctgacctcaggtgatccacccacctcggcctcccgaagtgctgggaatataggcatgagccacagcgactggcccttttgtttgtttgtttgtttttgagaacaagtgttgcccagatggagtgcaatggcgtgatctcagttcactgcaacctctgcctcccgggttcaagtgattgtcctgcctcagcctcctgagtagctaggactacaggtgtgtgccactactcctggctaattttatttttttagtagagacagagtttcaccacgttagccaggctggtctcgaactcctgacttcagatgatccacctgcctcagcctaccaaagtgcagggatgataggtgtgagccaccgtgcctggcccccacaccttttttttttttcctttcttttcttttcttttcttttttttttttttgagacagagtcttgctctgtcgcccaggctggagtatagtgccacgatctcggctcactacaacttccgcctctgggttcaagtgattctcctgcctcagcctccctagtagctgggactacagaggcacgccaccatgcccagctaattttttatttttagtagagacagggtttcactgtgttggccaggatggtatcaaactcctggcctcaagtgatctacctgcttcggcctcccaaattgttgggattataggtgtgagccactgtgcccggccaccccacacacctgtcagagaacggaagtcctggctgtgtttggggcctaggatgtcatctctctgggtctccttctcatctggaaaactgagctccatccacagagactggatggccaggtctgtgtggtcacagaggacagaaaggtgtccaggcctgggacctgttcatgaggggtggttggaagaggcaggcctgggtgcagatcagcaccccaaggtgcagcaggcaggggcaccggggatggggctgtgaggttcacatgaggttgcagaggtggctcctggagcccttctggggactgcagggcatggccagcaggcccaggcagtgcagatcactcaggagggctggggaggagcagggctgggggaaggcagtggccatgaggccaggctgcagaaggctgtgtggctggggctgggactcatgggagaggacggtcagttgtgagttttgcagcatctggcttcagggacaggagtggagggagttgaggctggttcctgggttctggtttgggtaacggggaagaggatagcccctcaccctacagacgacctcaagggaatgttttctctggtatttcctgctagggggacagatactcgcatgaagatcggaaataaagacatcagttgagtggttcttaggatggtacaggcaaaaggatttaagggtttggaacagaggatttttttgagacattatcagtcaatccccactattgtctgtttttgtttgtttgtttgtttttaatgaatttaagaccattggcctataacttcatacttgctcttttgtgaaatggaaatgggagaaaatatgcatacacacacacacacacacagccacaagatataatctgtgccaagggcatgacaactgggcaggagggtttgtggtggaccccacgtttaggacttaccagctgtgtgaccctggggggttgcatgacctcctgggcctccctgggtctgcccatgctgcacaggaccagttgtgtgaaggggctgccccggggctcaactcacctccactcccgccctccgtagctgtccttatggacacctggcccacagagcccagagcctcaagatcttgttagaaaaactgctggtttctctgggagcctcacccccacagcccacaggataacactagaggaattttttctttgttttgttttagagacagagtctttctctgtcacccaggctggagtgcagtggtgcaattacggctcactgcagcctcaacctcctggactcaagcaatccccccatctcaacaccccgagtagctgggactgcaggagtgcaccaccacacctagctaattttttatattttatattgtagagatgagggtcttgctacattgcccaggctagtctcaaactcttggcctcaagcaatcctcccgcctcagcttcccaaagtgctggaacttcaggcatgggccaccaaagtcccagtttcatagatgtatgcggacatgtgtggacaagaaaaaaagacacgtcggctgggcgcagtggctcatgcctgtaatcccagcactttgggaggccgaggcgagcaaatcacctgagatcaggagttcaagaccagcctgaccaatgtggtgaaaccccgtctctactaaaaatacaaaaattagctgggtgtggtggcaggtgcctgtagtcccagctactcaggaggctgagacaggagaattgcttgaacctgggaggcggaggttgcagtgagccgagatcgcaccactgcactccagcctgggcgacggtgggagactccgtctcaaaaaaaaaaagaaaagacatatgccaacatattcacagctgttaactctggggtcatggaaggatgaatgtttttctttcttgtgttttctgtaataaaatcatattacctttgtaataatatgagaaaaactaccaaacttacatttttttttttttttttttgagacagggtcttgctctatcacccaggctggagtgcagtggcaagaacacagctcactgcaccttttacctcctgggctaaaggcatcctcccatctcagcctcccaagtcgctgggaccacaggcacacaccaccatgcctggctaatttttttgtttttcgtagagacagggtctcactacattgcccaggctggtctcaaactccttggctcaagcgactctcctgcctcagcctccaaaagtgctgggattacaggtgtgggagcatgtttttttttttttcttttttgacacaggatctcactctgttgcccaggctgaagtgcagtggtgcagttatggctcactgcagcctcaacctcctgggctcaagtgatcctcccacctcagcctcctgagtatctgggactgcaggaacaggctgccatgcccagctaatattatcattttttgtagagatgggatctccctgtgttgcccgggctggtcttgagctcctggcctcaagccgtccttcctccttggcctcccaaaacactgggatacagcatgagccaccaaaacccagccccaaacttatttttaaatgaccagaaaaaaggtggcaatatattagagggagattgggcataggatgaagaatatttttcccagcttctctgtacatttatggactttccaagttattcacaataatctccaatgaggggaaaagggttttttgtttgtttgtttttttgagatggcgttttgctcttgttgctcaggctggagtgcagtggcgtggtctcggctcactgcaacctctgcctcctgagttcaagcgattctcctgcctcagcctcccaagtagctgggattacaggcacctgccaccacgcccggctaatttttgtatttttagtagagatggggtttcatcatgttggccaggctggtctcaaactcctgacctcaggtgatctgtccgccttggcctcccaaagtgctgggattacaggcatgagccactgcacctagaggaaaaggggcttttaaaagatttaaaaggtatttggatttgaggtgttgctgggggcagggactggaaacggggtcagtgggtgaggcagagaggggaggccaggggagattttggccaagatactgtgacaagaggagatgactgtgtagggttatgggttcaccctctacggagggacatggagcgcatggtgggagccacagctgagggtctcaaggagccagcagggggggacgaagatggaagaagagagccaggggaggagacaggtctctggagtggcagccaatgggaccagctaaggcaggggctcagaggagaggtggcgatttatgggacaaggggcgaaggcactaggagggcagagggagggagcacagggatgaggggctgcctggagaaagtggtggagggaggagggctggaagcagtctgtggtgcgggtggggaacacttggatgcacttcctgggacatggagaaggacggctcatgggaaggagggcatatgaggtggcagaggtgacagtgcctgcattgtggatggggcatggaacaggcagggaatgagagcaagaaggctgttgtggggaccgagggcctctccaagattagggtctctaatcttgggacaacaaccaaggtgaaaacaggcatctttcccttcatggagacaagagccctttggccaacacagacagcagtcccggggggcccttctgccgactcaaaaggggaaagaagggccgggcgtagtggctcacacctgtaatcccagcaatttgggaggcccaggtgggtggatcacgaggtcagtagttcgagaccaggctggccaatatggtgaaaccctgtctctactaaaaatacaaaaaaaaaaaaaaaaaaaaaaaaaaaaaggccggggggcgggaataacgtgggagaattggaagatgcaaggtggactgcacaggtggcaagttaccatcccatcccctgggcaatgacaaggggagaggctcccttgcccctggggtctctcagtcaccccagaggattaagaaagggtttaagtctccctgaaagctgagtgcaatggcccacgtctgtaatcccagtgctttgggaggccgaggtgagagggttgcttgaggccaagagtttgagaccagcctgggcaatgtagcaagaccctcatctctataaaataaaaaataaaaaattagccaggcatggttgtgcacttctgtagtcccagctactcgggaagttgagatgggaggattgctggagcccaggaggtggtgcctgcagtgagccataattgcaccactgcactcaagcctgggtaacaacagagtgagatccagtgtcaaaaaaaaaaaaaaaaaaaaaaaaggctggtcacagtgagtcacgcctgtaatcccagcacttttggaggttgaggcaggaggatcgcttgagccaaggagtttgagaccagcctgggtaatatagtgagaccttgtttctaccaaaaacaaaaaaattagccaggcgtggtggcgtgtgcctatggtcccagcgacttgggaggctgagatgggaggatggctttggcccaggaggccaaggggtgcagtgagccgtgttcttgccactgcactccagcctgggtgatagagcaagaccctctctcaaaaaaaaaaaaaaaaagtttggtagtttttctcatattattacaaaggtaatatgattttattacaggaaacacatgaaaacacaagaaagaaaaaaactcatctttccatgaccccaaagttaacggctgtgaaaatgttgtcataggtatttttttcttctccacgaacatccacatacatttatgaaactgggactgtaccaaaatactgatatgtactcaccataaacgtagacgccaaatattgtcacatctcctttattttccaactgtttattagaccccctttccctcgttcatttgaagtctaaccagtatttcccctttaaattgtctgggtccacagggatggggtcgtgcttctaaatgcccagtgtggagggagtgggccgatctctgcacagccgctgttcctgctcttggccacttggtgtcactgtcgagtctaaaactgcgcagccccacggacactgatcattctggcgctgccctcagttggccccggcccgcccagagtgcgtgcaggggcctggatcccacaacccaagacgatcattttcttttctttttgagacggtgtctcgctctgtcgcccaggctggaatgaagtggcgcaatcttagctcactgaaacctccgacttccgggttcaagcgattctcctgcctcagcctcatgaatagctgggactacaggcgcgcgccaccacacccagctaattttcatatttttagtagagacgaggtttcaccatgttggccaggctggtcttgaactcctgacctcaggtgatccacccacctcggcctcccaaagtgctgggattacagtcgtgagccaccgcgcccggcctggaagatattgctagattctgcaaagactttttggccagtaggaaaggaaaacacaatctgtttgcagctctgcccccagcatggccagtttccacctggtgtctggaattgcggggtaatttcccatggatgccaggaatggcaagggtgtccttcccgctcaggggacggacatgttgcaaagtcctttcctctttcggagctgagtgagagtcccaggaccttggagttctcagattttgctaccagagataagctaagggctaatgttgacctcgatttacgacttcagcaaacacggcagtgaccactctcttctcctctctctcccgttgatttgaggatccggtggacggttctgtggttcgcgattttgagcacaggcccaaagctcctgttgtagagtgcagcatcaccggcgacagcagcaggtgacctttccctcgtcttacactgggaagagggagggtgagcaggcatgccataaataggtatgcctgtgacatttttgtttttgttttaagtaatagatatggggtctcaccatgtggcctaagctggtctcgaacctgtggtctcaagcgattctcctcctgcattggcctcccaaagtgttgacattacaggcatgagccaccacacctgggctttgtgaatttttattttttatttagacaggattctgctctgttgcccaggctggagtgcagtggtgcaaacatggctcactgaagccatggactcctgggctcagtgatcctcttgcctcagcctcctgagtagctgggattacaagtgtgcaccaccacacctggctaatttttgtatttttgtacagatggggttttgccatgttgcccaggctggtctcaaactcctaggctcaaacaatcctgccttggcatcccaaagtgctggaattacaggcatgagccactgtacctggcctgttttgtttttgagatagggtcttgctttgtcacccacgctgtagtgtactggtatgaaaatgtaagtttcatgggaatttatctttttttttttcttttttgagacagagtcctgctctgttgcccaggctggagtatagtggtgcgatctcggctcattgcaacctccacctcctgggttcgagtgattctcctgcctcagcctcctgagtacctgggactacaggtgcacaccaccacagctggctaatttttttatttttagtagagaggggtttcaccatgttggccaggctgttctcgaactcttgacctcaggtgatccacccacctcggcctcccaaagtgctgggattacaggtgtgagccaccatgcccacatgggaatttatcttatatagaggacaaactttgccacagaaacgtgccatgtaagaagacaaggatacatttatgtttttttgtacaagaaaacatttcagaacaaaataagtagtctcttaaactatatccctgtgaaaagacagacatgggagcagagaggaaaacgattgatccttgcgggtgtagagatccctttaggagaggaaaacagctgggaggctgaggcgggcggatcacctgaggtcgggtagccttgaacaaggctagcctgaccaacatggagaaaccccggtctctactaaaaatacaaaattagtcgggcgtagtggcacatgcctgtaatcccagctactcggaggcttaggcaggagaattgcttgaactcgggaggtggaggttgtggtgagctgaggtcacgccattgcactccagcctgggcgacgagtgaaactccgtcttaaaagaaaaaataaaaaagaagaagaggaaaacagaagaaatgctactttgaaagcccttgatataaaggagcatgtgtgggtggctgaagagtactggggatgattgtgctgtggttccttgtgtgttaggtcctatttccttccttccttccttccttccttccttctttccttccttccttccttccttccttccttccccttccttcctcccttcctcccttccttccttctttccttttttttgatggagcctctcctgcccacgctggagcgcagtggcgcaatcttggctcactgtaacctccgcctcctggttcaagagattttcatgcctcagcctcctgagtagctgggattgcaggtgtgcaccaccatgcctggctaatttttgtatttttagtagagatgaggtttcaccatgttggccaggctggtcttgaactcctgacctcaggtgttctgcccgcctcagcctcccaaagtgttgggattacaggcatgagccaccgtgcttggctggttctctctagtttcagtgagaaccgaatggtccctagggtgggtgatggagcagtcttttaaagatgattgtgttaattataatcttggtcctaaattagaaaaatgaaaaaaagtcttcatagaagtcataggcaggccaggcgtggtggcttattcttgtaattccagtactctgggaggctgaggtgggaggatcgcttgaggccaggagagaccagcctgggctctgtctctaaggaaaaaaaaaaaaagagagagagaaaaaaatagccaggcatgatgatgagtgcccatagtcccagctactcaggaggctgaggtaggaggatcacttgagcccagaagctcaaggtggcagtgagctaggattgcaccactggactgcagcgtggatgacagagtgacatcctgtctcaaaaaagaaaaggaaaggcggggggcgggggaggatggaaaggaccacagacctaactgtctctgttgttaagaatcaatgtttggccaggcgcggtggttcacgcctataatactagcactttgggaggccgaggcaggtggatcacttgaggtcaggagtttgagaccagcctggccaacatggcaaaaccccgtttctactaaaaatacaaaaattagctgggcgtggtggcgggcgcctgtaatctcagctactcaggaggctgtggcaggagggtcgtttgaacctgggaggtggaggttgcagtgagccggtattgcaccactgcactccagctggggcaacagaaagacaccctgtctcaaaaaaaagaaccagtgttcgtcatcgtcatcttatttccagagtcattgccgcatcctatgataagacagtgagggcctgggacctggagacaggcaagctgctggtacgtatgcctgtccagtgggggcgttggttgcagcccaggggcttgaccaagcctcaggcagctttgggttggaccctgggtagggggaggtgataaaactccattcttctaggaaggaggcatgttcctggggatggaagtacagatgtgaactgcacccacaacagccattgcttgcaaaaagtctggagggtgagagggtgggcactgggggaggaagactcctggaggaggcggatggaaccaaggcttctgcttgaaagatgggatgggtttggatacacagaaagaagccagaattgggggtggggtgtgggggctggtattccaggctccccggtaagatgtttggatttgattagacaggaagtggggctgaggccatgggacaaaggccatgtgcccccaagaaccagggttctggcccttaccagtctgttctctttatatcttggagggggtcactctccgtccatcccacaggctcaagactcccactcggccctgcaccccttccaggcaccctcagctctgctcaggggcctcctcggggtctcctgcctcacccctgccgtccctccctctcagctcctgcaggccttttctgtcccttcctccttcctttccttaaaaaacaacctttcttgttagtgcaaaggtcagtttgtattcattgtaaacatttttagaaagacaagataagccaagtttttattttatgatgacgatgatgatgatttttagagacagggtcttgcaagctctgtcacccaggctggaacacagtggcgccatcgtagctcactgcagcctcaaactcctgggctcagatgatcctcccgccacagcctcataagtagctgggactacaggcgagcaccgccacacctggctcatgttttacttttgtagagatggagatcttgcatgtttcccaggctagtctcaggctcctggtctcaagcgatcctccagccttggcctcccaaagcactgggtttacaggtgtaacacaccacacctggcttaaaacaaccttttgattgctggctcatttcagtggaaggtcaggtatgataccttcatcgtctcctgtaagttttctcctgatggtaaatacgtggtctcaggcttcgacgtggatcatggaatctgcataatggacgccgagaacatcaccaccgtttccgtcatcaaaggtgagggtgtgcgggctccctgtatcttcagtctgccataggaatagccacttgtcactgactgacggtgaccttccattgctttatttggtgaaactgtaatggtatgaagcacgtcattaaagctgggacactaggctaggtgcggtggctgggattgcatctgtaatcccagcactttgggaggttgcttgagcccaggagtttgagaccagcctgggcaacagggtgaaaccctgtcactaccaaaaacaatacaaaaattagccaggtgtgatggcatgcacctgtagtcccagctgcttgagaggctgaaacgggagaatcacttgaacccggaggtggagattgtattgagctgagattgagccactggactccagcctggcagacagagtgagactccatctcaaaaaaacaaacaaacaaacaaaaaacaaacaaacaaacaaaaaaacacaccaaaactgatcctcttcagttaatgcttttccattcattcagtcttgtgcttttaacaaaggacacaatgttcggctccaacctcatgtggtcattgacagcctaatcttttattgaggggaggctcaggcttcttaacattaacattaacagagttaacattaacagagtcttgctatgttgcccaggctgatgtcaaactcctggcctcgagggatcctcctgcctcagcctcccaaagtgagggattataggagaagccccctcacccggcctacctgtatcttttttttttttcttttttgagatggagtcttgctctgtctcctaggctggagtgtagtggtgcgatctcgggtcacctcaacctccacttcctgggttcaagcaattctccttgcctcagccttctgagtagctgggattacaggcacccaccaccacgcccagctaatttttgtatttttagtagagatggggtttcaccatgttgggcaggctggtctcgagctcctgacctcaggtgatctgcccgccttggtctcccaaagtgctgggattacgggcatgagccactgtgcccagcctatttttaaaatataggacttagtaattgttgtatgacagtttcctggttgggacactgtgtgatgatgataccacatgttcccatgggggctgctgggtgaaggacatgggtgatttctctgttattccttacacctccatgggagtttacaattatcttaaaattaaagttaaaaaaatgtgtaatcattgtaaagacattcattatgggctgggcgtggtggctcatgcctgtaatcccagcactttgggaggccgaggctggtggatcacctgagctcaaaagttcaagaccagcctggccaacatggtgaaaccctgtctctactaaaaatacaaaaattagccgggcgtggtggcgggcacctgtaatcccagctactcgggaggctgaggcagaattgctggaacccaggaggtggaggttgcagtgagccgaaatcgcgcctctgcgctccagcccaggtgacagaatgaggccctgtctcaaaaataaaaaaatcattcattatgtaaataaaaaagcaaaaggctgctgtgtctgtcctgtctcctccccagaggcacctgttatgaaccatacattgctgggcagtcttcctgaaccctgtgtgtatgcctgtgcgtacaagtgtttgcacacacaacactgcttctcatatgtgctttgtgtttctttttatcgatgtggcactatgccatgtgcactgccccacagcttccctaatagcccctaagagcccacttgacactctgaccccaccatgcttcagactccagctttgccccacactgctccatgatccggcccaggcctttgcaagcactgttccttcttcctggagtgctcttccatttctgcttcccttgctggcttttcgggcccttcctggacccctcagggtggccaggcttatgttgtctgggccttggtggcccgtgcactcatctcatgatctgtggcatgtggcaggtcgttgcctggtccggggtgtctcctccatcagactggcagctctgcgggggcagggaacctgctgtgctcccggttcaaagcctgggacatagtagtcactcaggaatgtttgtgcaggtgtgtagctcctgatgaaaactggaattgtgttttgtaatcgtcactggctggggaagtcgtgggagtcctccagcccagcaggtggaaggcgtggtctcaagtccctttcctccgtgttctgcagatcatcacacaaggtccatcacgtcatgctgctttgaccccgacagccagagggtggcttctgtctcattggacaggtgcatcaagatctgggatgttacatcccaggccacgctgctcaccatcactaagtgagttggaccccaggaggccagaagggagtttgggtggggcgtccccattcatgacttcctgaattccacataagccagcatccatgtggacacgtctgtagcttggtcataggtgctctgaggaggctggggacaggcaggcaggagggagccatcagctgtggcctgtgggctgggctgggcctcagatgcatttgtttcaatgtgagccactagtggaaatcattgtgcagagaagtccacaaaaggtgaagttccagcatctcctgtaaaatgggaaggtctggctgggcgtgtggctcatggctataatcccagagctttgggaggccaaagtgggaggatcacttcaggccaggagttcaacaccagcctgggcaatgtcacaagaccccatctctacaaaaaatttaaaaattagctgggtgtggtgtcacacacctgtagtcccagctactcaggaggctgaggctggaggattgcttgagcctaggagtttgaggctgctgtgagctatgattgcaccactgcaccccagcctggacaatgaagtaagaccctgtctaaaaaaaataaataaataaagtgaattcagtcgttttggagatattacattatcatttaaaaaaattttggggctgggctcggtggctcatgcctgtaatcccagcactttgggaggccgagtggggcggatcacctgaggtcaggagttcgagaccagcctggtcaacatagtgaaaccccacctctagtaaaaatacaaaacttagctgggcgtggtggcgggcacctgtaatcccagctattcaggaggctgaggaaggagaatagcttgaatccgggaggtggaggttgcagtgagccaagattgtgccactgcactccagcctaggtgacagagtgagactctgtctcaaaatatatatatatatatatacacgcacacaacataaaacatgatattttaaccatttttaagtgtgcaattctctgccattcattacattcacagtgttgtgcaaccatcaccactatttatttccaaaatgatttcatcatctcagacagaagctcttacccgttaagcaataactccccattccccatgcccccagccctgggtaatgtttattctactttctgtctctatgaatctgcctattctagatatttcatataagtagagtcatacattatttgtcctcttgtgattaggttatttcacttaaaataatgtcctcaaggttcatctgtgttgtagcctgcatcagaacatcagaacttcattccttttttttcctttgagacttagtctcgctatgtcccccaggctggagtgcagtggtgccatcttggctcactgcaacctctgcctcctgggttcaagtgattctcctgcttcagcctcctgagtagctgggattacaggcgcccaccaccacacctggctaatttctgtattattagtagagacggggtttcatcatgttggccaggctggtctcaaactcctgaccttgtcatccacccacctcggcctcccacagtgctgggattaagaacttcattccttttgatgactgaatagtactgcattataggtgtacataccacattttgtttatctgttcatctgttgatgacctcttaggctgtttctaccttttagttattgggaataatgctgctatgaacacatgtacatgtaactttgagttcctgctttcaattctttttattttatttgatttcgagacagagtcttgctctgttgcccaggctggagtgcagtgacgtgatcatagctcactggagcctcggattcctaggctcaagtgatcctcttgcctcaacttcctgagtagctgagactacaggtgcacaccaccatgcctggctaatttttaagtttgttttttttttttttttgcagaaacggggtctcattatgtctcccaagctagtcctgaacttctgagctcaagtgatcctctcactttggcctcccaaagttctgggatgacaggtgtgagccactgcacctggcctgtttttaattctttactctgtatacccaggagtggaattgttggatcatatggtaatactgtgcttagctttttcaggagtggggatcttgcttattaattttgcactgagaactgaaaatgatatagcccgaccgacattatgaattttttaaatcctctagcaagatcagctatatcatttgcagggtgcaatctcggctcgctgcaacctccgcctcccgggttcaagcaattctcctgcctcagcctcccgagtaggtgggactacaggcgcccgccaccatgcccaactaatttttgtatttttagtagagacagggtttcaccacattggccaggctggtctcaaactcctgaccttgtgatccacccacctcggcctcccaaagtgctgggattacaggcatgagccacagtgcctggccacactgtggttttcatttacactgtcattcatattgtttttctcctataggtaaaaagtcatttctctcttgctgctctgaagatatttttgttgtccttagttttctgaagtgtaattatgtgtctgggtgtagatttctttggatttatcctgttgggttttactcagattcttgaatctgtaggtttatatattttgccaaatttggtaaaatttcagccatttaaaaaaattacttttaaagttgactccatcttgtccagaactgtacgtgcagcatagccattttccccaaacttctgtacaggtgaaatggccttctacgagaagtgggatttatgtgaaatgagagtccatagagatacctctggtttatttatttatttatttatgtatttatttatttagaaattgctatgtctttttttttactttaagttccaggacacatgtgcagaatgtgcaggtttgttacataggtacacatgtgccacggtggtttgctgcatctatcaacacgtcatctaggttttaagccccgcatgtgttaggtatttgccctaatgctctccctccacttgcctcccaccccctgacaggcctcagtgtgtgatgttcccctccctgtgtctatgtgttctcactgttcaactcccacttatgaatgagaacgtgtggtgtttggtcttctgttcctgtgttagtttgctgaggatgatgtccctgcaaaggacatgatctcattctttctcatggctgcatagtattccatggtgtatatgtaccacattttctttatccggtctatcattgatgggcatttgggttgacacgaagtctttgctattgtgaataatgctgcaataaacatacgtgtgcatgtgtatttatagaagaatgatttataatcctctgggtatacctctggtttaaacctcaatgacagtgtctggctgctgggagagcttgcagtcaaacctccatgatatgccagcatggttcttagctcaccaggcactgggaattggtgaggtttatcccggatggccctgcgaagttgacatttcttctcctttggcgttgctcagtttgtgcctttcaaagaaccaaaatgggttccaaaactctgatctgagctctagaaaattgttttgctcaaccttttcttcaggtcaaatgattgattttatgatccaggctactcagagaaaactctgcttacaagaggaggtgagaatcacaggagaaagacattgagggttacaaacaaaaagtggcaaaatacagacaggctttttattattattatttttctgaaaaagaagatgcttaaaaattggaatgaataacttcattttttttctgagatagagtcttgcactgttgcccaggctggagtgcaatggcacaatcttggctcactgcaacctccacctcctgggttcaagtgattctcctgcctcagcctccagagtagctgggactacaggcatgtgccaccatgcccagctaatttttatattttttgtagagatggggtcttgctatgttgcccaggctggtgtcaaaatcctgggctcaagcaatccttccacctaggcctcccaaagtgctgggattataggcatgagccactgcacccagccaaataacccacaattttattaattaaatatacaacactgaaatatacttgaatagcactgaagacaaatgaggataggagtgagaaaaagggagagtgaatagttggggtggagaagcagaggagtaagtaagagaggggtggaacagggggagaccacgcctgacattgttgggggaaagatggggagcaggagagagcctctgtgtaagcgccacccagcaccaagccccaaaggctgtctgtcaatcaatcactcctgacaccagctgcttttccctccagcgccaagggaatactgcagaatcttcccaaatgagggcaatttgtgccccagtggacatttgacaatgtctggactcatgttttgttgtcacaactgggtgtgggggttcctggcatctagccaggagaggccagggatgctgctccacctcctacagaacacaggacggcccccacaactctgagtgacccagctcaaaatgtccaccttggtgtggttggcccagtgccgtggctcacgcctgtaatcccagcactactttgggaggccaaggcaggtggaccactagagcctaggagtttgagagcagcctgggtaacatagcgaaacactgtctctattattatttttctaaaaattggtgcagtcgagaaatgctggaacagcgtgacagtctgagcaattcacatctggaccatggtaggcagtgatcaaaggcatgatgaacatgagctcacaggagatgctgacccccacttaggtatgtcttcaggtcctcttggggcgaagtgctagcatgtgcagcccgaccatgagctcacaggagaaaatacccccggctttaggtatgtcttcaggtcctccaggagcaaagcgctaatgtgtgcaccccaccatctgtgtttcagggcacattccaatgcaatctcaaactgctgttttaccttcagtggccatttcctgtgtacaagctcctgggataaaaacttaaaaatatggaacgtccacacaggggagtttcgaaactgtggagcctgtgtgactctgatgcagggccatgaaggttctgtcagttcctgtcactttgccagagacagtgagtaattaacatgcagaaggcctccattcctgtgggagtgctgggcagagttctccatgttccgttcaaatggacagagaggcaatttccaatgatgctgacagggagggcggattcttccccacgagaacaaaaaacccaagagggaagaccacaggtaccagtttacagtggtagaaactcagctcaatgtggcgtatgcaaccaaagaaattgattaatcctgtaatggaaaagtccaagagcacgtctgacttcaggcatggatgggacaagagagtcaatgctgttgggaacccaacccttccactctgtctttcaacctagcttccctctgtatcagcctttacccccaaggaggcaaagatggccggatgaggtgccttatgcctgtaatcccaatgctttgggaggccaaggtgggaggactgcttgaagccaggagttcaagaccagcctgggcaacacagcaagaccctgtctctacaaaaaaattaaaaaattagctgggtgtggtggtgcacacctgtagtctcagctcttcaagaggctgaggtgggaggatcacttgagcccaggagtttgaggctgcagtgagctatgattgtgctactgcactccagcctgggcaacagagtgagaccctgtgtctaaaaagaaaaaaaaaaaggccaggcacaatggctcatgcctgtaatcccagcactttgggaggctgaggtgggcggatcacctgaggtcaggagttcaagatcagcctggccaacatggtgaaaccccatctctactaaaaaatacaaaaattagccaggtgtggtggtggatgcctgtaattccagctattcgggagcctcaggcaggagaatcgcttgaacccgggaggcggaggctgcagtgagccaagattgcaccactgcactccagcctgggtgacagagcgagactctgtctcaatatatatatatatgtatatatatgtgtatatatatatatatgtatatatatgtgtatatatatatgtatatatgtgtatatatatgtatatatgtgtatatatgtatatatatgtgtatatatatatgtatgtgtatatatgtgtgtgtgtatgtatatatgtatgtatgtgtgtgtgtgtatgtatgtatatatatatatatatatatatatatatatatatatatatatatatataaaattaaagaggtaaagaggacctttagtggtccagctcagcctagttctggcccctggcagtcctggagaaagagaccttctgtctgatggtgccagaacaagtcccagggaagactcccattggctcagcttgggacacatgtccatctcttaatgaatcacttagggggcaacgaaagcctctgattggccaggtctgggtgacttgcccacctgcagagctagggttggggtcagaaccccctgatgcagagggactaagagtaggcaaggagtgtttccccacaggaaattgggagctgttgccagataaagggacatagaggtgaatgggggcagtgacaggaagccaccgcggctagccagctccagggagggaagtgggtgctcttgacactcaggagccaaacatatgctcccctatcctggtgagaagtggggcttgctctgtgtgtctgggggcctcagctggcacacatgccactggggcctggcttgagaagcactagggtgcttctgggcaactttccctcttcagcagcaccccttgtctaagtcccactgtgaggcaccctgccagcttctgtccttggctttatggggttcagaatcacatgcagttgagccaaaattgtgccactgcgctcctacactctagcctgggtgacggagtgagactctgtctcaaaaaaagaaaaaaagaaagaaaaaaaaaagaatcacatgcagttaatcattattattcctgattctgtatttgtgaagtcacctacttgctgatatttatttgtaaacctaaagtcaacattcatggcactttcaaggtcactcacagatgtgaagagcagcaaaaaatctaagtcacctcccagctgaggttggacaaggcaacactctgccttcttgtttcacctcccacgtggtaaaatgtcctttttgtggtctatttagtgccaccatttttttttgttgttgtttgtttgttttgctccctctgttgcccaggctggagcgcagttgcgcgatcttggctcactgcaacctctgcctcctgggttcaagcgattctcctgcttcagccttccaagtagcttggattacaggtgcgcactaccatgcctggctaatttttgtatttttggtagagatggggtttcgccatgttgtccaggctggtcttgaactcctgtcctcatgtgatctgcctgcctcagcctcccaaagtgctgggattacagacgtgagccaccacacctgggctttcttttgctttttgttagtgattttgctgtgtaaaatggctcccttggccgtgtgtggtggctcacagctttaatttcagtgctgggggggtgctgaggcgggagtattgcttgaacccaggagtttgagatcagcctgggcaacatagtgagaccccatctctaccaaaacaaaaaaaaaaaatttagccaggtgtgctggcacctgcttgtagtcccagctacttggtaactgaagtgggaggattgcttgagaccaggagtttgaagctgctgtgagctgattgcatcactgcactctagcctgggtgacagagcaagaccttatctctaaaaataaataaataaataaataaataaataaataaataaataaataaataacaaataaaatgatccctaaccacagtgccgaagtgctgtttgccgttcctaagcgcgagagtgctatgatggggaaaatgcatgcatccattcaggcatgagttacagctgttggttgtgagttcaatgtaaacaaatcaacagtatatatgcaataaggtgtctttaaacagaaacacacataaaacaaagttacgtactgatcaactgatgagaatgtgaccagagctcgcaggaaactgaccctgtatttcccctaggagcgatggttcagtattcactaattcagtgtctgcaaaaactgcagaggcccccaacctttctggcgccagggacaggtttcatggaagacaacttttccacaaatgggagctgtggaggatggtttcgggatgacccaagtgtattacatttattgtgccctttatttttattattattacattgtaatatatagtgaaataattatacaagtcagcatcatgtagaatcagtgggagccctgagcttgttttcctgcaactagatggtcccatctgggggtgatgggagacagtgacagatcatcaggcattagattctcataaagagtgcacaacctaatccctcgcatccgcagttcacaatagggttcatgctcccgtgagaatcgaatgctgcagctgatctgacaggaggccgagctcaggtggtaatacgagcgatggggagtggctgtaaatacagatgaagctttggcttgcttgcctaccactcactgtctgctgggtggcctggttcccaacaggccatggattggtaccagtctgtggcccagggactggggacccctgtcatagaacatgactactgtaaatgataagaatcagctgtaattggcttggggtcgtggagccactccaggaaggggtttcagtgttgtcagagtgagatgaggtggtgcctcgccaaggcatcttcagctggctttgggctcacttggcttggaaagttgacccccatctccaccctttcattttctgttgcaggctcttttctcatttctggagggtttgataggactgtggctatttgggatgtagcagaaggctaccggaagctctctttgaaggtacatgtggccagcatgagattgaggatctgaacttccctcccgagtccttcctgtgctcaatgctggttgctggggacacagctgtgagtgacacaggccttgatgcctctgtgggctgatgaaggacagacaggaagccagcaaacacaccaccgactgtgaggagtgaaatggagaaaccacaacagggtgacatgatggggacagaggcgggggacccatccacattgcatgggcagagcttcctggagaaggaggtgtttgagctgagaacagaaaggactacataagtggggatcttgaagaagaagggcagtccaggcagatggaacagctgatgcaaaaaccctgaggtgggagtgtctaagaacagcagaagttactgtgcaggcctgggcactgtggctcactcctgtaatcccagtactttgggaggctgaggtgggcggatcacctgaggtcaggagtttgagaccagcctggccaacatggtgaaacccccgtctctactaaaaatacaaaaatcagccgggtgtggtggtgcaaacctgtagtcccagctacttgggaggctgaggtgggaggatcgcttgaacccgggaggcggaggttgcactgggccaagattgtgccactgcactccagcctgggcgatagactgagattctgtctctaacaaaacaaaacaaaacaaaaaacagaaattaccttgaagagagacgcatgccctagtgaggcatgcacagaaagcttggggttccaaaatggggatgtcaactgaatgctctgggctacaagtgagaggatgagaggagccccaactcagagtggctctatgatacggggatgtgttatccaacacagcaagaacccacaattgcctcatgctgtgcccctgttcccccaaggggccccacaccccaggatttctgcatactccctggtttcacgatctcactgtcacctttggctgtgaatgcgtgcatccctgattcttggtctttctgttcccagggacacaaagtagacatgtgtccttgagcagcccatattcaggtccctggggctggtctatctgagctgtcttctcctaggacttggggagacaaagcgagtttcctcacagcaaataaacggattaaaatggaatgttaaacctctctgtgcttaaagtccctctgtcatctaggcacagtggctcatgcctgtaatcccagcactttgggaggctgaggctggaggatcattggaggtcaggagttcgagaccagcctggccaacatagtgaaacaccatctctactaaaaatacaaaaattagccaggtgtggtcatgcccacctgtagtcccagctacttgggaggctgaggcataagaatctctagagcctgggaggcagaggctgcagtgagctgagattgcaccactggactccagcctgggtgacagagccggttgttctattctctctcctcttctctcctctttctctgtgctcccatcctcaaattcctgtcctttaattacactaagcggtttaaccttccctctgattcctttttctctaaccacactatggcctcactttctgcctctttccatacggggaaggccaaagaaggacagagatgctggcataaagcccagacatcattcagtgtctgaggcagcaatggcagctatctgctctgagctgttttttttgtttgtttttttttgagacgggagtctcgctctgtcgcccaggctagagtgcagtggcatgatcttggctcactgcaagttccgcctcctgggttcacaccattctcctacctcagcctcctgagtagctgggactacaggtgcccaccaccatgcccggctaattttttttttttaaatttttattttttagtagagatggtgtttcaccatgttagccaggctggtctcgatctcctgacctcgtgatctatccgcctcggcctcccaaagtgctggcattacaggcatggagcaccgcgcccggcctgctctgagctcctatgtacccaaagaaaacaccccactccttctctgcttaagccacagtggatcgagtttgcagttattggaagcgaaaagccccctcacttacagggcctctgaggggtatttcctagaacaaagaatgcaaatgaaaacctgagaccagctgggaatataatatttctcccccaatcttgctaaacacccgagtactattttaaaaaaccatacacagtggcacacacatttgtagtcccagctactcgggaggctgaggcaggagaatcacttgagcccaggaggttgaggctgcagtgagctatgattgagctgctacactccagcctgggggacagagtaagaccctgtgtcaaataaaaataactaaataaataaatatagaatgggtagggcgcagtggctcatgcctgtaatcccagcactttgtgaggctgaggcaggtggatcacttgaggtcaggagttcgagaccagcctggccaacatggtgaaactccatctctattaaaaatacaaacattaggtggggtgtggtggctcacgcctgtaatcccagcactttgggaggccgaggcaggcagatcacgaagtcagaagatcgagaccatcctggctaacacagtgaaaccccgtctctactaaaaatacaaaaaattagccgggtgtggtggcgggcgcctgtagtcccagctactcgggaggctgaggcaggagaatggcgtgaacttgggaggcggagcttgcagtgagccgagatcacaccactgcactccagcctgggtgacagagcgagactccgtctcaaaaaaaaaaaaaattagctgggcatggtgatgggcacctgtaatcccagctacttggcaggctgaggctggataattgcttgaacccaggaggtgaaggttgcagtgagtggagattgcaccattgcactccagcctgggcgacaagagcaaaactctgtctcaaaacaaacaaacaaacaaaccccaaaaaacaacaacaacaaaaaaaatagaatgtacatatatcacatgtctttacactttgtattccaccctaaatgttgttgatgaaaccgaggaagtacaatgagctgctctgctctttccttttttttttttttttgagacagtctcactctgttgcccaggctggagtgcatgatcatgactcactgcagcctcaacctccccgggctccggtgactctcccaccttagcctcctgagtagttgggattacaggcgcatgccaccatgctcggctaatattttgtatttttagtagagatggggtttcactatgttgcccgggctggtctcaaactcctagactcaagcaatctgtccacctcaacctcccagagtactgagattacaggcatgagccactgcactcagccagctactcttaaatgtaagcaacactgggttcttgactttttgttgtttttttagatatgggacctcactctgttgcccaggctgaagtgcagtggtgcaatcatggctcactgcagcttccacctcctgggctcaggtgaccctcccgactcggcttcccaaaaggcaggttacaggtgtgagccactacacccagcttgtttttgttgttctttcaaaattattttctccacgttttcattaaaatttgatatttcttcagggccataatgactgggtgatggatgttgccattagcaacaacaagaaatggatcctgtctgcttccaaggtaaaagtggtcaagcttacaatatcgatcacgttcgccaggattggtgatagtggaagagttattgccaagtataaaattcctgggtgggttcggtgagctgtacctgaccgggccatcgtgttcacggagctgcctgggaatgtggacagcatgtccttctatgcgcaaacgcgatgagtttggagtttccaggtatttctgtgtctgtaccgttgacatttgaactttgttggaaaaagagtctggctggatcagtgagcaatggagccaatgggggacttgaagggaaagcatcaactcatggataagcctttgacactgcccaaggtccgggggggtctccctttcctgcagcactgcatcttgagattcccattccactggcacatagcagccagcccaggatatcccaacagctgtcctgcaggtgtgaaccccggagaagtggggacctactccgccctccacccatattagagcagcagtccccaacctttttggcaccagggaccagtttcgtggaagacaattattccatggttggggggcgggggatggttttgggatggtgcaagagcattacatttattgtgcactttattattattacattgtaatatattatgaaataattatacaacccaccattatgtagaatcagtgggagccctgagcttgttttcctgcaactagatggtcccatctgggggtgatgggagacagtgacagatcatcaggcattagattctcataaggagcacacagcctagatcccttgcatgcacagttcacaatagccttcgtgctcctgtgagaatctaatgtggccactgatctgacaggaggtggagctcaggtggtaaagctagtgacagggagcagctatatatacagatgaagcttcacccctgctcacctcctgctgtgtggcccatttcctaacaggccacagactggggggtcggggacccctttatttgagcatgtcatgttctaggctagaggtttctaaatccaggagactgtgggagaggcgctgcctagcatgatcaacttttcagagagccaacttggaatacaaacatatcagaaaaaaaaaacaacaaacccataataatacaatatatagcaaaagattatatgcctatatgttactactttaatataaaaataagaagtaaaggtttacttgaaattatacattattttatattttttacttttttgttccatgaatattattatttaagcaaaacaacaggactagtgaacagcgacaattagtagtaattaacagtagggcaaattaaacaaatatgtttgagaaaaatataaaaatattggccaggtgaagtggctcacgcctgtaatcccagcactttgggaggccgaggcgggtggatcacctgaggtcaggagtccgagaccagcctggccaacgtggtgaagccccgtctttactaaaaatacaaaacttagccgggcgtggtggcaggtgcctgtaatcccagctactcgggaggctgaggcaggagaattgcttgaacccgggaggcagaggttgcagtgagccgagatcacgagatcaagccatggccctccagcctgggtgacaagagcgaaactctgtctcaaaaaaaaaaaaaaaaaaattatgtttctttctattctttgatacagtactttagtgttactttaaaaaaaatcttggctgggcatggtggctcatgcctgtaatcccagcactttgggaggttaaggtgggaggatcgcttaagtccaggagttggagaccagccttggcaacatagtgagacgctatctctacagaaaaactttaaaaaattaaccgagtgtggtggtgtgtggctgtagtcccagccactccaggtccagctacttgggaggctgaggtgggaggatggcttgagcctgggaggtcgaggctgcagtgagtcatgatggcatcactgcactccagcctgggccaaacagtgagactggttgtggtctcaaaaaaaaaaaaaaaaaaaaaaagctgggtgtggtggccactcacgtctgtaatcccagcactttgggaggccaaggcaggcagatagcttgagctcaggagtttgagaccagcctaggcaacgtggcaaaaccctgtctctataaaaaattagccaagcatagtgatatgagcctatattctcagttactccaggcccagctacttgggaggctgagatgggaggaatgcttgagcttaggaggttgaggctgcagcgggctgtgatcatgccattatactccagcctgggcgacagagtgagaccctgtctctttaaaaaaaaattattgaatatttaaacttttggctaggcgcagtggctcatgcctgtaatcctagcactttgggaggcagaggtgggaggtctgcttgagcccaggggtttgggaccagcttgggcaacatggtgaaaccctgtctctaccagaaatacaaaaaatagctaggagtggtggcgcacacctgtagttccagctactcactcaggaggctgagatgggaggatggtttgagcatgggaggcagaggctgcagtgagccacaatcatgccactacattctatcctgggtgacagagctagaccctgtctccaataaataaataataaattttgtaggttatattatatattcttaagatatatagaggtaagactgtttaaaaaagagaacacaaataaaataggattgattaaatacatattacttatatttaatgtaaagcagtgacttcattctatgaggccagcacaagttggataccaaagccaagaacaaacatgacaataaaagaaaattacagaccaatatctcatattaatatagatgcaaatatgctcaacataatattggcaaataaaatccaacagtacattaaaaggattatttaccatgaccaagtgggatttatcccagggatacagggtggctcaacataaaatcaatgtaatatattacattaatagaacaaagggaaaaaaaaccctatacaatcatttcaactgacacagaaaaggcatttgaaaaaattcaaaaccctttcattataataataaaaaaacccagaaagctaggaataaagggataattccgcaacatgataaagagtgtttagaaaaaatctgcagctaacatgattctcagtggtaaaagactaaaatttttcttccctaagatcaggatcaggacaaggatgcctactttcattgctactattcaatattgtactggaagtgctagccggagctatcagacaagaaaaagaaataaaaggcatccaaattgaaaaggaagaggtaaaattctcttcctttccttccctccctcccaaccttccttccttccttctcttccttccttccttctgtcctttctttcttccttccttcaatccttccttcctgccttccctcctcttttctcttctctcctctcctcctctctcctctcctctctcctctctctttctctctttctttctttctagggtctcattctgtcacccaggctagagtgcagtggcacaatctcgactcactgcaacctccatctcctgggttcaagcaattctcccggtagaaacgggatttcaccatgttgtccaggctggccttgaactcctgacttcaagtgatctgcccaccttggcctctcaaagtgctgggattacaggtgtgagccaccatgcccagccaaaatgatttctttctttttttttttttgagatggagtcttgctctgtcacccaggctggcgtgcagtggcatgatcttggctcactgcaacctccatcttctgggttcaagcaattctcctgcttcagcctcccgagtagctgggattacaggcatgtgccaccatgctcggctaatttttgcatttttactagagatggggtttcaccatgttggcaagggtggtcttgaactcctgaccccgtgatccacccgcctcggcctcccaaagtgctgggattacaggcatgagccaccgtgcccggccccaaaattatttctattcataggtggcatgatcgtaaatatagaaaatcccaaagaattaacaagaaagctactaaagctaataaatgaattcaacaaagtttcagggtacaaaatcaacacacaaaaaagcagttgtgtttctatacaccagcaatgaacactctgaaaaggaagagcaattccatttacaatggcatataaaacaatacttaggaataaatctaacaaaggtggtgaaagactggcacaattaatactataaagtattgctgaaagaaattaaagaagacttgaatgaatggaaagacatcctatattcatggataggaagactcatcattaagatgtcagtactactcaaagtaatctacagattctgcataatccttatcaaaattccaacagcattttcatatgaaattgcaaggggccccgaatagccaaaagaatcttgaagaaggagaaggggaaggagaagaataagagggagaaggagaagaagaaaattggaggactcacactttctgactttgaagttactacaagtctacagtaattaaaacagtgtagttctggcatagggacagacatatagacaaatggcttagaatagaaagcccagaaataagggatttttgacgagggtgccgagaccattcaatggagaaagggcagtcttttcaacaaatggtgctaggaaaattggaaatttacatgcaaaagaatgaaattgcacccttacctaatactgtatagaaaaattaactcaggatcaaacaccttaacttgagagctaaactataaaacccttagaagaaaacagtggagaaaatcttcatgatactgactttggcagtgatttcatggatatgacaacaaaagtataggcaatgagagcaaaaacagacaaactaaacttcgttgaaattaagaacttttgtgcatcaaaggatactgtcaagaaagcaaaaagacaacttagagaatgggagaaaatagttgcacatcatgtatctgataagggattaatatgcagaatacataaagaacttcgaaaactcaacaacaaaaaacaaacaacccatttcaaggatgggcaaaagactcgaataggcatttctccaaagaagatatacaaatggccaagaagcatatggcaagatgctcaacatcattagtcattagggaaatgcaaatcaaaagcacagtgaggtatcacttcacatctattagggggtctataataaaagaactcagaaaataatgaatgttggcaaaggatgtggagcaactggaacccttgtgcctgactgatggtgacagagtgagacccagtctcaaaaaaaaaaaaaaaaaaaaaaagattttacttactggcaacaacaggttttttgatttgtaggctttatttcccagcactccaaaagtgttcaatgtactaaatctataagcttgctttgaaagaccaggtatttgtcaatgaagtcctttgcactataaattcacggtataggctatatctatctaaaatgtgcattatttatttattttattttattttatttttgagatggagtttctctcttgttgcccaggctggagtgcaattgcacaatcttggctcaccgcaacctccgcctcccgggttcaagtgattttcctgcctcagcctcccgagtagctgggattacaggcatgcaccaccacgcctggctaattttgtatttttagtacagacggggtttctccatgttggtcaggctggtcttgaactctcgacctcaggtgatccacccaccttggcctcccaaagtgctgggattacaggcgtgagccactgcgcccagcccatttatttatgttttaaagagacagggtcttgctgtatcgcccaggctggagtgcagtggcatgatctcagctcactgcagcctgaacctcccgggcttaggcgatcctcccgccttagcctcccgagtagctgggattacaaggtgcccgcgatcatgcctggctaattttttgtatttttagcggaggcggggttttcccatgttgcccaggctggtctcaaactcctggccttaagtgattcgaccgcgttggcctcccaatgtgctaggattacaggcatgagccactgtgcccggcccattttgacatcttttctatggtcagaaatgataatagccatcttgtaggcacatgtttaaggaagatatctctttccatttctctaattgaaaatcttggctgggcacggtggctcatgcctgtaatgccagcaatttgggaggctgagatgggcacattgcctgagctcaggagtttgagaccagcctgggcaacgtgcccaaaccccatctctactaaaaatacaaaatattagtggggtatggtggcgcatgcctgtagtcccagctattcggggggccaaggcaggagaatcactggagcctgcgaagcggaggttgtagtgagctgagggcatgccactgcactcgggcctgggtgacagagtaagaccctgtcttaaaaaaagagaaaaaaagaaagaaaaaatctcattaagtgcttctgtacatttcgaggaaggtgaaaagtggccccaaacacactataggtgtgtatcaccacacccagctaaataaaaaatattattattattatttttttgagacagagtctcgctctgtcacccaggctggagtgcaatggtgcgatctcggcttattgcaaactctgcctcccaagtttaagtgattctcctgcctcagcctcctgagtagctgggattacaggcatgcagcaccaggcctggctaatttttgtatttttagtagagacagagtttcgccatgttggccaggctggtctcaaactcctgacctcaggtgatccgcctgccttggcctctcaaagtgctgggattactggtgtgagccaccatgcccagcttgaaactaacttttgaattaaagtatctaagagctgggaggatgttttttgttgtcatgatttgacaaaccacttgctatactgtaggaagtatgcttattggtaagatctgacagctttaggcagcatgaagtcaacacatctgttacaaaaatgacccctttgttctcccacaggatatttagttgcaactgctgaatcaagaaatgtaacatactcaatgtatccatttttttattgctgctataataagttaccagactgtactgtttaaacattaaacaacataaatttaatatcttacagtactgtaagatagaagtctgataagctctcactgggctaaaatctaggtatcaacaggactgcattcctttcaggaactattattaactaaggtccatggttttatagtttcatgctttgtgttactgtatatttttgccaaatgcatatcatatatccaccaatacagtgtcatatagttttgtttgtttgtttgttttgagacagagtctcactctgtcgcacaggcttgagtgcagtggtgcgatcttggctcactgcaacctccgcctcctgggttcaagtgattctcctgcctcagcctcccaagtagctgggactacaggtgcacgccactgtgcccagctatttttgtatttttagtagagacggggtttcaccatattggtcaggctggtcttgaactcctgacctcacccaccttggcctctcaaagtggtcggattacaggcatgagccaccgcgcctggccatacagaatagttttactattcatccctcctcctcttccctataatcctgggcaatgactcatctatttatattcttcagttttgccttttccagaatgtcatatggttggaattatactctgtagcctcttcaggttggcttctatggcataacaatgtgcattgaaggttcctctgtctttttgtgccttgacagcccatgtcttttgattgttgaatgacattcctttgtatggatgtaccacagcctgttttgtgaccgctggtttgctatttgttttaggataggaccatgagactgtggaatattgaagaaattgatgaaattcctttggtaatcaagtacaaaaaggccgtgggcttaaagttgaaacaggttggtattgggtaaaattaagcccagtgaaggctttcgttagttccctctataaattaatttatcatttgaatgaactttgggcacctggagatgcaatcgtgaacaaacagactgacatttttgccccaggggagcttaaattctaagagaggaaacaaagaggaaagacacaagaaaaatgtgtagtaagtctcatggtgataagtaattgacagaaaaatacatagcaaacaggagtaggagtgctggaggttgcaagattttaaagggtggtcaggataggtctcattgaggactgacagctgtgtcgacttgaaggtggtgagggggtgagccatgcagatatttagaggaaagaacttccagctggatgcggtgtttcacgcctgtaatcccaacattttgggaggctgaagcaggcggatcacctgaggtcaggagttcgagaccagcctggccaacatggttaagtcctgtctctactacaaatacaaaaaaattagccaggcttggtggtgcacacctgtactaccagctactcgagaggctaaggcaggagaatcccttgaacctgggagatggaagttgcagtgagttgagattgcgccactgcactctagcctgggtgacagagcgagactctgtctcaaaaaaaaaaaaaaaaaaaaaaaaaaaagagaagaaagaacttcccagcatagagaacagccaatgcagagagagcctgagaggcaggagccagcctggtgcatcggaggggtggagtgagggggcttggaggggatgagacctgcaggagcactggtcagtggaggaatggccgggtacacagctgggcactgcgtcagcctcctaccctgggcaggtccccagtgccccacttcccatgcaaaaggcttaggtgcctgcgcttctctagtgcaagagcttggtggtcaggccagcatattttctgcttcaccaggcacagctggggctggccacagaggctgtccctgggcagtggaggcaactctccgctggagcctctctgtgcacacacctggctgctgccttggagtgcaggctgggcccctttaagtccttccctgggaatcctggagctgcctagacttggcctcctctcagaaggttcggctgggagccactgcttctgggaatggctaatttgggagccgcactgcaaggcagttgtgtgaggggtgggactcacatggaccttgtccctgtttggcccttaaactgtgaaagctgacttgctacagagcagtgatggcccttgtttttcactggccacctagggcaaggcctgggagcctcctcctctgtgagccctgttgttctggggttggaccgtgggatgtaggaatgtaggataaggtaggtaaaggatcaaatttccttttttctttttatttcttttttgagatggagtctcgctctgtcgcccaggctggagtgcagtggcgcgatctcgtctcactgcaacctccgcctcccgggttcaagcgattctcctgcctcagcctcccgagtagctgggactacaggcgcccaccactacgctggctaattgttttgtgtttttattagagacggggtttcaccatgttggccaggttggtctcgaactcctgagctcaagtgatccgcccgcctcagcctcccaaagtgctgggactacaggcgcaagctatccgcacccaaactgggatctaatctatttcttgcaaaaaaggaaaagaaagaggcctacctgaagctgaagcaaggatgagcctgctgcatttgacttgctctgaatcaatcaacatgagaagcctgaggccaggcttccccgaggcctgccccaggtagggtttacccccctctccagcaggcctcagtgtcctggagtgggcagaacagcaaagcccaggggctgggagagccagggcaggggcgcggccaccttgcaggctcttctccaggggaccatgcatggtgggaacccctgaggggcctctgcccatggcctaggagacctcatcccatggcactcttgcttgttagtgggaagcagacgtgatgggtgagctgtgccatttgttttcagtgtactctgtgagctttggccagaaacaggctcagggacgcaggagggcacctagcacctgcatcaatctgcttcacacccctgctttgttcagaaatcttgcctacttgcgtctcatggttctgtaaaagttgggtgttctcaggatgtcagggagtcatcctcttagtcccacaattttactcggcacagaacaatggatggggcgggacactcacccccatcctcccaactgtcaaggggcttgccacgcatgtcctcaggacccccatggcaggagacatgagctggcaggagacatgagctggcaggagacatgagctggcaggacctgcttagccattggtggggaagcagcctgtgctcattctctctgcaatttccgcctttgtggggttagagattccagagaggggctgcgcccagtggctcacgcctgtaatcccagcactctgggctgccaaggtgggtggatcacttgaggccaggagttcaagaccagcctggccaacatggagaaaccccatctctactaaaaatacaaaaattagcaggatgtggtggtgcacgcctgtaatcccagctactcgggtggctgaggcaggagaattgcttgaacctgggaggcggaggttgcagtaagcctagatggtgccactgcactccagcctgggcaacaaagtgagactctgtctcaaaaacaaaaacaaaaacaaacaaacaaaccaaaaagagattccagagaggggaacccttgccttgccccagctcaaggtagctgggagaattctaatggcatgcctggatcacctctgaccagcacctcctttctgctcttttaaaatatcccatgtcagtgcgaaagatgtgacaggcctttctccatcttcaagagtgacacctcttctgaaatgttcacccaatgcgtgttctgccggatagatacaaggggcttgccagcagatacttcatcgtcatcatcatcatcggaaagggagaactcaccgccgccaaggggaagcaaggatgactgacagccacaggcccctttgagtgactccagcacaggctacctagcatgtaggtttcggggctttgcaggggctttctcttgggcccctcccaggctcagcaggcctgtcagactggggcaggacccaagccctggctggactcagcacagtgccacctcctcagctctcagcttggggagtgaacactttccgttttcatgcagaataaatctaattcctttggaaaacaagcgtgcatgtgcatctgaaaagcagtcttgctatttctaagctttatgtcttggtgctcatcctgtttgattcttggaacacatattagactcacattgtggagtctggagttgccctgtaaggtgacctgtgggggctggcaccagcagttctggagagtttgtcaaatgagtatgacaaggtgtggggccccctctgtggacgtgatggcaagacacaatgagtgcctccctggctaatgctcccagatggccacttgcccggagcagaggacggtttggttaggcaagggggtggcggtggcattgccatcacgggatgtctcacgctttctcctctagacgtcttaatttccagaaccccttgcttatgtgcagccctcttcctgctgccacggcattttgcacagcgtgcatcaatccagaaataggctgagataggagcttagtttcctattgcacaccatgctgggtgaacctttctgtgcatgctgcagggatgctgggtggatgggttggcagtgttcggcttcgtagttgcccacaggccctctggaaagtgcggagaccagtggctggtgtagttgcgtgaggacacccagaaggggtcagtgagaaactagggaggggagggccttgcctgctctggcagcagaaacccctccatgtaaggtgttggtgctccacgccagcagcctgggaaccctgaagtccacgatccctcctgagccttccggacccctcgactttcccccagctcaggatccgcggaagtagcgactcaactgaagttatagtcccgggagctggcagggccccgggtcttctcaggctgaggtcgcggggcagaatggtccgaagctcaccggggtcacagtcggaccgaggcgggtgtgcgcctcgaccggacgccaggggagccagcagcccggccgcgctggcggggccgggggttctccggagtgggtaggggctcgaccgcactgccctgagtcccaagccctgcaccagcgttccccaaaggcggagcgtcctggctccacgttggaagagacattaccgtgaccaggaagtctggccttcccaggctccgcccgctccgtgcagcccaagcttccggtctcagtctcagctgcctgtgtgaatcggaagctacactacgcgtgcgccacaacaggccgaatgtgtgcgcatgcgcgcggcccatatggtaaatagtaatgaagaatagtttaggaaagtacctgtacgggtggcgccgtggcttagttggttaaagcgcctgtctagtaaacaggagatcctgggttcgaatcccagcggtgcctcaaccgagcgtccaagctctttccatttttgctcctgcacttttgtgctctgtacccggctgcccgatactatgagggtgtgagcgggatcccgagaggcctaggtagacgggccccccaacggggcgtggcctcggccacgggggcgggtgcaggcgggcttcggactccaccttctcgggtctcaggctctgtggggcgtaggcggcgcggggacccaggcgaccgcggttgccatggtgctggctggccgtgggaggcgagcggcgggctgggaagcagctgtgcgagtccagcgaggagccggtgttcgccccgaggctgcttcctcagggcgggcggtggacgcgctctcccacgccgccttctgtggcgtgggttcctcgcgctagtcttcctggctccaagctgccacttgggggagcccacgcgggtgccgatcctcgacgttcgccgggcttagctgagcctcgcaaaggcctgaagattgcccgtctccctgcagccgcgcagtgggtgcagccttttcacaaatgcaagacctggaccggcggcgaggccaaggggaccccgtgtggagggatgcgggactgagtccggttagcgtgatcctcagtccgatgactgcgtggaaactccaggccaggcaggggactctgccccagctgcagacggccgggtgtgggctgaagccagctgcctgggctggggttggttgctcagcgctggggttctacccacatttgtatgtgggaacctattcctgagcaagtgcattcgaggctttgggggtggtggggtagggtggggtgaggcattggagtttttacaaacattctccagggattcacatgtcaaacccgacaggacagtcccagtgcagaaattgcagtcatggcataggctgtgtagtcaaattcacctgccccagaagcagttcctcttcctgcctcttctatggatctgggtttattgtttttgtttgtttgtttatttctgtcgttttctagtcaattctcgcgcttttgtatcttggttgtttttgactgacattgcctaggaaagcttgtaaggagactttgacgttttgcagtgctgataggagcgttcacctggatccaattagggatgaatttattggaaactgggcttgcgtcattgtggagctggtttatttctggctcatacttacgccactgcaatccagcctgggcgacagagcgagattccatctcgaagaaaaaataaaaattaaaaagtccctcattggatacagggtttgaaatcttttctccgtttccttttctctttgctatttatttatttatttatttatttatttactgagatggagtctttgtcgcccaggctggagtgcagtggtgtgatctctgctcactgcaacctccgcctccccggttcaagcgattctcctgtctcagcctcccgagtagctgggattacaggtgcacatcaccacgcccggctaatttttgcatttttagtagagacgaggtttcatcatgttggccaggctggtctcgaattcctgacctcaggtgatccgccccgcccacctcagcctcccaaagtgtggggattacaggtgtgagccaccgcatttttttttttttgagacagagtctcactgtgtcaccaggatggagtgcagtggtgtgatctctgcccacggcaacctccacctcccgggttcaagcgattctcctgcctcagcctcccaagtagctgggactacaggcgcgtgccaccacgcccaactaatttttgtatttttggtagagacggggtttcaccatgttggccaggatggtctcgatctcttgacctcttgatccgcctgccttggcctcccaaagtgctgggattacaggtgtgaaccaccgtgcccggccttctttgctttcttaatactgtcattagaagtgcaaacgtttcaatattgatcaagtctaatgtatctacttttcctttttgcttatgcttttgatgtcatattcaagactccattgccaagttcaaggtcataaagatttacactaatgttttcttataagggttttatagcttttgctcttacatttaagttttggatctactttgagtcaattttgtatatgatgtgaaggaggggtccagcttcattcttttgcatgtggattttcattcatccaaacgccatttgttgaaaagactattctgttcccaaaggtcttggcacccttgtggaaaatcaattgaccataaatatgagggcttatttgtggttttctaattctagtaccttaatctacatgtctagctttatgcctgtgccacactcttgataactatagctgtgtactaaattttcaaattgggacgtatgaggacttcaaagttgttattttcaagattgttctggctattctgggtctgttgaatttccatgagttttagaatcagcctgtaaatttctgcaaacaatccagttgggattttgatagaaattgcatttgatagaaataaatcatttggggggatattgttatcttaataatgttaagttttctaatccatgaacatggaatggctttcaatttatttaggtcttctttaatttctttcaacaaggtttttagttttcagagcataagttttacacctcttttgttaagcacatttctaagtattttctttttttgataccattataagtagattttttttttttttgagaagcagtttcactcttattgcccagactggagtgcagtggtgcgatcttgactcactgcaacctccacctcccaggttcaagcaattctcctgcctcagccacccaggtagctgggattacaggcgtgtgctaccacgcctggctaatttttgtatttttagtagaggcagggtttcaccatgttgcccaggttggtctccgactcctcgcatcaagagatctgcctgcctcggcctcccaaaatgctgggattacatgcaagagacactgtgcccagcctgggtcccatatatttcttgctggggttatttctagatactgtgaatgggataattccattttttaaaaattgcatgctcctgctaaataggaatgcctttgatgtttaaatgtggctccttaaagcagccctcttgcctgactgtcttgactgtcttattactgctgattgcttgtttgatttttgggcagattctgaattgtgcaaattgggatggtgaatgataactttgatcttaaagggaaaaaaaggacaacttacaaacaagaaaaagatatctacaacacatataagtgacaaaataatttttagcagaggaagggcccaaggggtatagcaaagcagtgaaaattaccgcattctatcagaatctgaaaagctgggttatgaacaatcccagccttcagtatttatccaaaataaatgaaaacaacgtccataagaaaatgccacagatgctctcaatacaatagtaaaaaactaggaacagcccaggtgtccacaggagatgaataaactgtgggttatccaggcaatggaccactacacagcaagagaaagggatgggatgctgacacttacacagacgtgggtggaatctcacgtcgtgtacagtgaaacagtacatcatttatgatttcacttacataaagctctaggaaatgcaaattaatctatagtgacagcagagcaatggttgcataggtggcagagattgatttcttgaaaatgggtacaaaaagaccttcgaggggttgatggaaatgctctttattttgtaggagtttgggtgtgtgtttatcaaaactcattaaattgtatgcttaagatctatgcatttcacagcacaaaagtcaatctaatctaaataaaaatattaaaggccgggcacagcggctcataccagtcatcccagcagtttgggaggccaaggcgggtggatcacttgagctcaggagttcaagaccagcctggccaacatggcaaaaccctgtctctactagaaatacaaaagtagccaggcatgatggtgcacacctgtagtcccggctacttgggagtccgaggcacaagaatcgcctgaacctgggaggtggaggttgcagtgaactgagattgcgccactgcactccagcctgggtgaaagagcgagactctaactcaaaataaaataaaataaaaaataaaataaatgaataaaaagagttcaagactggcctagtcaacatagcaagacttcctctctctaaaaaaaacttaaaataataaaagtcatgttgacagcagtctggttcgtcttcccagcctgtccccaccagctccacgtggatttaactatttcttgcacatggcctgtgctcttccagtagggcagagcctgcatttgttgggcggtggactgtcccatttccctctgtttctacctcccatgcaactgtggcctgaagggctccagacagggaaagagaggtttcatctgcgctaggagggcagagatacgcacataccatcagctgcttccaggagagggtttcagctttaatgactgagaggtggcctcagccttggggaagaaccctcctacagcctctccggaggagcagggcctcctcactgccggggaaggctgagagtgtggtctccagtatgctgagttctcagctgcaggaggcagaatcactcatccatttccctcacccacctctgttcaatgatggtgatctttccttttctttttgaaatggagttttgctctattgcccaggctggagtgcagtggcacaatctcagcttactgcaacctctgcctcccgggttcaagcaattctcctgcctcagcctcccaagtagcttggactatgggcatgtgccactactgcctggctaatttttgtatttttagtagagacagggtttcaccatgttggccaggctggtctcaaactcctgacctcaagtgctctgcccgcctcagcctcccaaagtgctgggattacaggtgtgagccacagcgacaggccaattttttgcttttttaaagacagggtttcactcactttgtcgtccagtctggagtgtggtgattcaatcacggctcactgcggcctctaactccagggctcaagccatcctcctgccttagccttccgagtagtggagactacaggcatgagccaccatgccagggtaatttctaatttttttgtagagacagggtactgctatgttgttcaggctggtcttaaactcctgggctcaagtgatcctcccgcttgggcctcccaaagcactgggattgcagtcatcagccactgcgcctggccagtgatgggtgagttttataaatcaaaatgtaatggtgaatgtatttgtacaaactatatttacaagattctatcatttaatttaaaaggttgactggtgtggaaacagaaacatcatttcgcaccacattttatttcctacagtcaattagattatactttaatacaaaaaactaattaaaatttaatcgaactttagcaaacatgggatgtctatgaagtgtaagacaatttactacatgttctgggggctgaacaggagcgtgcttttggtttctaccagaagcggtctctccctgccgcacgtccgcccctgaaaagaatgcctaggataggcaaattcaggcaggcggggagagaagggtggtgttggaattagtgtggactgactttcagcattgttttgttcttcactgatctgtgcctctgagataatgtaacaccttcttctgaatttagagtggctcctaagaagcagttgtgatcagttatttaaaaaaataaaatgatgccaaactggacactggctgggcttactatgctgtgtatggcagatcacctggggcacgtgtgcgtatctgggattgaattgcataagcaggttgggagccttgctttaaggatgggttggaggccagctgatgctccaggagcctgtctgctcttgaattcctcagcagagcttctctggctcagtcccacaggcacacagctaagggtgactgcaggcttcggggtggacatctgggatggctgcccagcaggtgatgttcagtaaatccacacctaggagaatcaagccctggagacggccaggctgatcagattcctctgatgctggagtgcgcacctctgatttccctctttcagtgaatcccaaagctctttttttttttttttagatgaagtctcactctgtcgcccaggctggagtgcagtggcacgatctgcaatctctgcctcccaggttcaagtgattctcctgcgtcagccgccccagtagctgggattacaggcgcccaccaccacacccggctaatttttttgtatttttagtagagatggggtttcacgatgttggccaggctggtcttgaactcctgagctcaactgatccgccggccttgacttcccagagtgctgggattacaggtgtgagccaccacacccagcctacattttttaaaagagaaagtaaaaatgtaaaccatagggccaggtgtggtggctcatgcctgtaatcccagcactctgggaggccgaggcaggcagagcacttgaggtcaggagtttgagaccagcctggccaacatggtgaaaccccgtctctacccaaaatacaaaaattagccgggcatggtggtgggtgcctgtaatcccagctactcgggaggctgaggcaggagaaacacttgaacccaggaggcagaggttgcagtgagtcgagattgtgccgctgcactccagcctgggcgacagagcaagactctgtctcaaaaaaaaaaaaaaaaaaaaaaaaaggaagccatagatggggagagaaatttggaatacgtacaccgagatccctctaagggatctccggagttccaaatagtcttactcacttccagcgtgagtggtgttccaatttccccttggcaggcagggtccatcaccccagccagcccagtccctcccttctttgctcattgattcagaggcatggggagctcagagtggccaggagtcagtctcaacttccagttcggtggaatcagtgctgtgactcctggcggaatcattccttccttaggagctaagacctctaggccagcagaccatgagatgggaggaacaggaaacaaaattacctagtggctcactaagggtaatagtgaacggtgccattccttttccattccttgattcctggaccctcgaatcctggctagaagcagcagcgccatctatcggacgctaattcggagcttatgccgccttctgaacaaccttgctccaaccctgcaaggtatcgcctctgagctgatgctgtaactgcgtcttcaaaaggccattccaggccgggcgcagtggctcacgccagtatactcagcactttgggaggccgaggcaggcggatcacgaggtcaggagttcgagaccagcctgaccaacatggtgaaaccccgtctctactaaaaatacaaaaattagcaaggcgtggtggcgtgcgctcctcgggaggctgaggcatgagaatcgcttgatcccaggagacagaggttgcagtgagctgagatcgcaccattgcactccagcctgggcgacagagtgcaaaaaaaaaaaaaaaaaaaagaaaaaagaaaaaagccattccactgttctatcaagccagctgcttcagattggtggggaacatggcaacaccagtgaattccataaacatcgccgcacttcatttgtgggaaattgaattcctttttgtgtgtgtgtgacggagtctcgctctgtcactcaggctagagtgcagtggtgtgatccctcggctcactacaacctctgccttgcagattcaggcgattctcctgcctcagcctcctgagtagctgggactacaggcgtgcaccaccatgctaggctaatttttgtatttttagtagagatgggatttcaccatgttggccaggctgatctcgaactcctgacctcaagtgacctgcccaccctgacctcccaaagtgctgggattacaggtgtgagccaccgtgcccagcctactttattttctttttaaaaaatttaattcatgtttcataataatcctctccctccccacttttagagacagggtcttactctgtccctcaggctggactgcagtggtgcaatcatggctcactacagcattgaactcctgggctcaagctatcctcctacctcagcctcctgagtagctgggactacagacatgcaccactgtgcctggctatttttttttttttatagagatgggggtctcactaagttgcccaggctggtctcaaactcctgagctgaagtgatcctcctgccttggccctctaaagtgctgggactacaggcgtgagccaccatgcccagccctttccccctttgtaatgttgtttcatttggtttgggccaacataacactgttcttaaataatataaaaatgaatggatttaaatacagtgattaagttcataataaagatgggctgtctgtggtggtggaggggcccacggagctccagcaagtgggtagcactgcctgcttcctattgcatcccccagggaattccagggtgtgtgtgtgtgtgtgtgtgtgtgtgtgtgtgtgtgtgtgtgtgtgtgtgtctttctctctctctctctctcagggctggtggtcttgctaccagacacctggagcccctctgccagctgctttgagcttggctgaaagtgagcttggtctgctcctctcacctgctatgattaaggaggggccactccttgggacggaggggcttgtccatggctttcttcatccacccctccagccttgcattcccacaatctgtacttaggcctcgagactcaggctgtctcagggtgtcacctttattcctgtggctctgtagtaacctgttttgtgttgctgtaaaggaatgcctgaggctgggtcatttataaagaaaataggtttatttggctcacagttctgcagactgtacaagaagcttggcactagcatctgcttctggcaagggcctcaggaggcttccaatcaaggccagacatggtggctcatgtctgtaatcccaacactttgggaggccgaggcaagcagatcacttgaggccaggagttcgagaccagcctggctaacatagcgaaacctcatctctactaaaaaatacaaaaattagctgggcgtggtggcaggtgcctgtagtttcagctactttggaggctgaggcgggagaattgcttgaacctgggaggtggaggttgcagtgagccaagattgcaccactgccctccagcctgagcgacagagtgagactgggtctcaaaaaaaaaaaaaaaaaaaatccaatgaaggcggaaggcaaagggggagccagtgccatgtggcaagagaggaaggaagtgggaggaagtgccaggctgttttaagcaatcagctctcactcattcattactgtgtggggggcaccaaggcattcgtgaggaatccaccccaagacccagacacctcccacgaggccccacctccaacactggagggccacatttcgatatgaggtttgaaagcgacaaatatccaaaccatatcaggcaccaacagggttaaataacaaaccttacctgttagcccatcttggggtttctgatgtgcttggcttcattaataatttagtgaggtggacgagattggactgactcttcccccaaatcaatacacaaatgattattgcttgagggtacttctgagtgcttcagcaagaccgagggagctttttggttgaaaatgggaactgcactcagcactggaagttcctgcagagaaggttatgtaaaccaaggggcgacctgctgctaacattttcattgcaataaaacactttttttttggaatggtgcttttatgacatacttactatcaccgtttcaggcctataattttaaaattactgcacaatattgaaggtgaaatgattttactgccgctggtctattaaggttctaggaactggctgcagcttggagagtgtctatggctggatgcacttggacacaccgtgccgactgccctggacgtgcctgcagacacagcaggctggatgggtgcactgtggctgggtgtgtctgggcactcccacaggcgagcaggcattcagctctgagctttgcagttcccacctggactgaccaaactctaccagccctcctgccccctgcccccccgccactgccccgggattgcagaaatgctaggaagctgcactgaagtcaaagcagcaaccccggccagctgtcccaccccactgaactcaggaggaaatgctgtgattgctaccatatatgttgccagtttatttgtagtattttaaatttatttttatttttattatttatttatttatttatttattgagacggagtcttgctctgtcgccaggctggagtgcagtggcgcgatctggactcactgtaacctccacctcccgggttcaagtgattctcctgcctcagcctcccgcgtagctgggactacaggcgcgcgccaccaggcctggctcattttatgtagttttagtagagatggggtttcaccatgttggtcaggatggtctcaaactccagaccttgtgatccgcccgcttgggcctcccaaagtgctgggattacaggcgtgagccaccgcgcctggccttaaatttatttttattattattattatcattttttttttttttgagagagagagtcttgctctgttgccaggctggaatgcagtggcacgatctcggctcactgcaacctctgcctcccaggttcaagtgattctcctgccttagcctcctgagtagctgggattacaggcctgtgcctccagacccagctaatttttgtatttttagtagagatggggtttcgccatgatgaccaggctggtctcgaactcctggcctgaagtggtctgcccaccttggcctcccaaagtgctaggattacaggcacgagccacttcttctggccttgtatttttgtttgattttgttttgtttgtttgtttgttttttatggtaaaagacacatggaatttactattttaaccctttgtagctgtacagtttagtggcattaaatacattcacattgttgtacaaccatccacatatccatctcaagaacttttaattttcccaaactgaaactccttacccattaaataactctctatttgcccctcctctcagcccctggcaaccatcattctgtttattgtccgtatgaatttgactatgcaagatgcccctgtaagcggaatcagacaatatttgtccttttgtgactggcttatttctcttagcataatgtcctcaagtttcatccatgtcatagtatgtgtcagaatttccttctgttaagactgaataggtggctcacacctgtaatcccagcactttgggaggccgaggcaggtggatcacctgaggacaggagtttgagaacagcctggccaatgtggcgaaacactgtctctactaaaaatacaaaaattagccaggtgtggtggcccgtgccggtaatcccagctactcaggaggctgaggcaggagaatcgcttgaacctgggaggtggaggttgcagtgagctgagattgcacaactgcactccagcctgggcgacagagggagattctgtctaaaaaaagaaacccaaaaaaacaaagaaacaaaaaacggaataatattccactgtatggatggaccacattttgcttattcattcatcatccatcaaggaacacttggttactcccaccttgtggtcattgtgaatgatgacgcaatgaacatgggtgtacaaggatctgtctgagtccctgctttcaattcttctgggtatataccctgaagtggaatggctggattacatggtaattccatttttaattttttaaggaacccgtatactggtttccacagtagccgcaccattttacactcccaccagcaatgcacaaaaatgtcaatttctccacatccttgccaacatgtgttgttttctgtgtattccacccctgccccccaccgtagccatcctaatggaggcaaagtggtatctctctgtgattttgatatttttaattcaaataaaccttagcacctgtattagtccgttttcacactgctgttaaagacatacccgagactgggtaatttataaaggaaagaggtttaatggactcacagttgcatacggctggggagtcctcacagtcatggtggaagatgaaggaaaagcaaagagacttcctacatgtcagcaggcaagagaggacttgtgcaggggaactcctctttataagaccatcacatctcatcagattcattcactatcacaagaacagcatgggaaagacccacccgcatcatccaattacctcccaccaggtccctcccacaacacttgggaattgtgggagttacagttcaagatgagatttggatgggaacacagccaaaccatatcaacaccctttctcaaaagctccattttttctcttcttttctttcttgtcctttcaccatcttactccaaagttggacattaacttctgttcagaaatcccacagtcacaggccctcatgttaatttctacccaaatggctgagcttttcaaatgtcattggagaaacatggattttaatgtatacgatggccgggtgcggtggctcactcctgtaatcccagcacattgggaggccaaggcgggtggatcatttgaggtcaggagttcaagaccagcctggtcaacatggtgaaacctcgtctctactaaaaatacaaaaattagctgggcatggtggtgcatgcctgtaatcccagctactcagcaggctgaggcaggagaatcatttgaacccaggaggcagaagttgcagtgagccaagatcacgccattgcactccagcctgggtgacagaatgagactctgtctcaaacaaacaaacaataataaaaaaatgtatacgagagcaaaatagccatttagaagacatcatcctgtgaggcacctctgctagggttccgggagggatcaaggctacaacaaaccatgatcacaccactgcgcaaagcatttcaggacagtttctgcccaaggagagactgggcagacagaccttcctctttcactgctggccccaggtgcttgcagttctctccaagggggccctggagacctgggggtccatcagtatgtccatgtgctggagcggctgctggcaggatcaagaacttccctccaaacgctctctggcttgactattcgcctgatggaacaggcagaaggatagaaattagctctggggggagcggaaacattctgaggccagagcaagctggtgatgagtggggcttggagaaggtggcaggcagggctgttcacaggatcatgcagcttgagctaaaaactttgaagtctgttctggagcattttcagcagtggggatgaaccaatttgcatgttaaaaacgtgagcaatgaattgagaggcaagggaccacatggagggaggcctctgtggaggtccaggagacaggagatggtggctgggaccagggaggtggtcacggtgatggagaaaggtgggtagatttgagatacatcatggggaccagcaggttgtagtgatggattggatgtagggagattggagtaaaaatgatcaactcagtaatggacgtggccatgaactgagtagggcacagtagagaaggggcagatgtgggggtgaggggtgtctggtctatggctcagctagaataatgagaggtttgccctcttggaagtcacctgtgataaacttgggcataaaggtgatcataaaacaatttttttcagttttatttgccaaagccacttttggcctttgaccttcaaatagattgtaggatttttgttgttgttgtttttgagacagaatctcactctgttgcccaggctggagtgcagtgtgcgatcatggctcatcgcagcctcaaactcctgggctcaagcaatcctcccacctcagcttcctgagtagctcagactacagatgcataccaccacacccagcacattaaaatttttttttttgtagagccagggtcttgctgtgttgcccaggctggtctcgaatcctggcctcaagtgatctgcccacctcggcctcccaaagtgctgggattacaagtgtaagccactgtgcctggctggttctagttatttgaaatcaggaaagacactgaccattcaacacagagtcctcttcattagtgtctggtaagcaactggataagagagcgcttgagtttgcatctgcctgtgggtgaatgttgggggaggatgtgggactctcctgtgtcattggtttcttctgtgtcccacgagggctcggggtatgtggctgatgagtgggcaatggtggtggccctctcgtatgggatggagtggggacttacatgggatgcctctgtgtcccttccgtctcctctctgcatgtcctgtggctcctcactcctgcagcagattcctgaaggcgtcactggcccacagtgactgtgacagcagctttgcttcctcctaactgggaaggccagcttcttgccaggaagcccctgctctcatgtctgagccctctgccccaccactgctccctcacctgccccagccagtcagttcccatattctgggtccatgcccaccatctccttcccagtactgaattctccaatggttagaagcttttgggttgtgatgaatagacacgttctggatatagcttgagtcaatgagggaggtttacgaaaaggtttcagaggtggagagacccaggcgattgcagctagcgtggaagagtgttgaagcagagacaggaataccaggaacctttccagatgtggtgagagggcggtgggggagaggactgggccagagctgcattggggacccccagcaagggtcttgcctggcacagcaacctctagggggcactagaccatcatgagacaaacgggaaatggggtgtcagttatgggccggggtctcaatatgggccgggagtaggatagggcagtgaggcactcaccttgggcacagaattgaaggaagtgccaaaaaactcaataatgaagataaatcaactttaatgcaaattttttgtgtgtgtgcaatggggacagttgtttccaatcagcccaaggttcctgggtaccttggccgtttcttgccttatgggtttatgagggttcacaatgggatgtgcatagattggggagcatggagatttagatatagtcatgtgattgtagagcttttcttagcctttccacttggttcaaaatatgggaggatattttgataagtgtgtctaggggctcacatttttcttttgcttcaggctccaacatgattcccatattggtcattggtctggaccctagattccttacataacgtgcaaaacatgcattgaagcaggcagcatcttcaacaaaaccgcatattttggccaggtgtggtgggtcctgtctgtaactccagcactttgggaggctgaggcaagaggatcccttgagtccaggagtttgaggttgcagtgagccgtgatcacaccactgcactccagcctgggcaacagagcaagaccttgtctctacaaaaaaatgaaaaaattagcctgacatggtggtgcacacctgtcatcccacctacttgggaggctgaggtgggaggattgcttgagcccaggagtttgagggtacagtgagctatggttgcagctctgcactctagcctgggtgaaaaagtgagactgtctctaaaaaaactaagaagcagcagcagcagcagcaacaacaacaacaacaacaacaaacgaacaaaccgcagatccaccctaccattgcccctgcctctgttgagcatttttgccatgcgtaaataaatgcctgctcatccgcagtcagcagtctgaggaaattctgaaaccaaattacacataggctagtgctctatgccatcaatctgtaatgtatcttgttatttgatttttacgtcctttaatacatttcctaagaagtctgctttggaaaaatcaccaaaggaattagaagagagagaataagaaaacccagaaaaactaaaaggatttttcttccccccattttttattaaaatccaatcaacctgcacagtgcgagtgagtgagtgactgtctacgctttcactaacggaccatcagtttctctcaaccttctctccataaacggagaatatcaaatgagggtctgggggtgttagaaaagggttgggagcctcagctcaggttggtgggcccgctgtgccatggagcctttggggacctctgatttcacatccgtcttggccctaaatggccttctcaaaccttccccctgtctctcctggttcttgcctcattggactcaacctcttggtgggcagctctccagagggcacccccagcctaagaagcaggcctcctcccaagtccccagcctcacgaggatagtgggtaacagggtgggctcagggggccctgggagatctccagaggcctctggtgtgttcaccaatgtcccctgacaggtcttgcttggcacagggggttcctcttagagacgtgacagggcacttggactgtggcaaatgaaagaagcggaggggcaggaacagggacaccttgcgaagaagacaggccttagccttgtgccacccctatgaggtccctaagccgtcctctctctcccaccttttcccagtcctcgctccccggtcctcctcagcacagccggctccaggagggatcaattcgtgggcccgggaggaggccaggcgagcaccggctgcctggagcactgggctggagcgcggggagcgcggcggggggcgcgggcggggcggggctggtgcgcagagctgtccagcaccccgaggcggggcgtgcgcccccggcccgccccagccgcctccgcccgcccagccagcgccactgcggctcggcgggcgcgtcacgtggctggcgcagcgcggcctccaggctccgggcgcgggcgaggggccgggcgggaggactgacagacccacggacgctctaccggcggcacccggccgggcgggctgggcgcagcgcggggcggcccggggacgccggggccgggcgggctgcgcgccgcggggcatgggcgcgccgggggtccccgggcccaggccggccgcggcggggctcccggggcgcgggggcagcggcgggcgggggtcttccctggcggccgccgctgagcccccgcagggcccgtgacgccgcggccgatgtggccgcgcgcgccctacgggcctgcaccgccaccgcacaaagacgcctcgggagccgccgcctgcacccgggccgcagcagccacgccagccggagcccgagccctagcccgagcccgagcccgagccgcagccagagccagagccggagccgcagccggaaccggagccggagccgcggggcaggaggcggcgcccgcgggcggccgggcccggcatggagaagcgcgcggccgcggggctggagggcgcgccgggcgcccgggcgcagctggccgtcgtctgtctgggtgagtgggccgcgcgggccgggcaggtccgggtcccccgcatggcagtccgcgccgcgccctgaccgacctcctctccggccgcggcatcccgagccccccaccgcggtggctcccgcgcggagacccagagaggggccagcaccgcttgcccgcctggccccgggcctgggagggcgactctggtggcgcagccccggctcccgccccgctcggagtagcgcccggagcccgggctgagcgctggcaggaggcccttcgtgcaggcggcagccttcaacccggcccgcccgcgctgagcctggagacgagggggccccgggagctggggacaaaggccaggccggctgtcccctgaagaagaaactgtttccggcccggagttggggtgggggctggtgtaagccgcagatggggactcggggtgcggggcagggctggaggagggtgccagtgtggaggcggcttccaggggactcctgttttccctttgtgtctctcagcccccaggcaggcctgttcagtttaggagggtgcttgggttgggccagggaccggtcaaggccaggcatggggtgggaggggctcccgccctgtccgggagtttttctgtccagctttccagcgctctgtgtaggcgagaggaggagttaaatccccaacccacatggctcctttatttactgtgatgaaggagggaggccattataagaactgggggtcattaggggacaccctgtgatgtcaccagtgagggctctgtaacctgacaggtttgctgaagccactgaaatgacaaagtaatcacccccaggcctcagggagctccgaggctctggcaggcccttgccccagctgtgtgagcctggctcagtgggaatgtgccattggggagcattgagggtgtaaccccagcgcgcccaccccaacctcagtgcggggtcatgtgtgctgggctctgagctgctgggtgctggcatccctggtgagcagagcagggggacaggcgctccatgcttaggagctttggcctggctctgtccagggggcctgggtgtcctgggtgggggcagcggttcctgcttcctggccaggcgggatctgacacacatcctgaaccccgggaagttgggtttccccccaccccccgactctgggcccgtaaccccccgggccagagcagaaggtgaaagtaagggccaaaccccacggaggtgggtgcttgaggggtggctggggagttctgctttcctcctcaaagtcagcttggcacgggggaagaggatggttccgtcactagctgcgtgccctgtaaatggggattatcagaactgcctcccctcctgcctctgctgctgctgggcgagcaaagccccttggtagggggaagcccttcaaagttgtaggagcaggccagggtgcggtggcaggtgcctgtaatcccagcactttgggagaccaaggcaagagaattgctggaggccaggagtttaagaccagcctgagcaacacagtgagacctcatctctacaaaaataaaaaataaaaaaataaccaggcatagtggtgcacacctgtagttccagctacttgggaggctcaggtgggaggattgcttgagctcgggagtttgaagctgcagtgagctatgcactccagcctggataacagaacatggaggcagggaggtgggggtgaggtggtagggaccctcttgatgggcagtcttgggctgcgctctgggccttgccctgtaagaggaaggggaccagcgggccagccttgggtttagctgtggtgtccctcatgggctgctgctggtccccagcaggtatgtgggacccctgaccctttctttgtatctcccacagtgaacatctttctcaccgggagactcagcagtgcggttcctgccttaggtaagtaagcactttctctccttcctccactccttcagtcccttttgggtgagtggtccctgaagacaggccttcagggtcctggcactaccccgagttcctgtgtgcatcttttctacatcacaaaggagctgtttggctttggacaggcttcaacttgtctgagcctcagtttcctcatctgtaaagtgggtgaaataacaaggtctactcaaaacctgtctcttagtattccatgagccagtgaggcaagctcttagtgtggtgcctggcacgtggtggctttataccaccggcaagctgccgagggtcccgtggaattgacatcttgtgcctcattgcaggccatgagcttcctaggatttaatttataggagtatgactgaggggtgacacagagaggcccatgccagggaaagaaggctttattaattttcttgaaaggaggggacatgccacgccatgcagggccacctgggaattactagatttggacaagcaggagcaggggtggaagaaaggtgtaagttagaagctgcatcacagcttccgtgggaaagtctcgacatccaggtgctgtggctcacgcctgtgatcccagcatttgggaggctgaggcaagagaatgcttgagccctggagtttgagaccagcctgagcaacatagtgaaactccatctctacaaaaaaaatctgaaaattagctgggcacggtggcatgtgcctgtagtcttagctactcgggagactgaggcaggatgattgcttgagcccaggagtttgagattgtagtgggctatgacggctccaccgtgctccagcctgggtgacagagcgagaccctgtctgtaaaaccaaaaccaaaacctgaggtcaaggtgcagcccgggagaacaatgggggcctctgacttgttcgttgcctgctgctctgctcggtggggcaggaggtgcctgggtttctagttctgtgcagggcccggcttgctggagaaaggacccggagctgtcaggcagcgggacccctgctgtggtcaaaggggaggcccagggtgcacagaagctgtgctcactggctcctctggcaggcttgggcctctttccctctctctctgccctgagctgtgctctcaggagcccggcctcctctgatgcttcgggctggctcaaggccgggccttgctcagcgctgacctagccccagccctgtctgctgtcctggtccacacaactgatggaggcccagtctcccatcccaatttccaggaaaaggctgactggcccagcctgggtcagatgtctgtggccatggtagagtcaggggaagggggaatgagggtgtcacagcttatgaatgtgagccccaggacaccctcctgctggtgggtgtgtcaccccaaatgtgtatatactccactttcagaaaagtgcttccctggggactagggccagtcatggagcttgggcgaggaggacactgtccaggtccttgcgtttggttgtccttagctgtcaagacctcaggccccagcagggtccacgttgccaaactccaacggctgctgttcacccctggtgccctctgtgatgggagctgcacgcccagcgcgcaaggccatgggtggtgatctgggaccctagctgtcctagagtccacttctgacacctccagcattactgaccacctgcaggtggcccaaggtacccacctcccaccacagctccatgactctgcatttccagagctttccctgggattcctgctgtgtgggaccctggattgggaaacattcccccagccccttctccaccctaactaggctcagttgctccagagggtctagcagggctacctggggacctcacaggtttttacccctcagcaaaccccatcctaagcccaggtatgttgggccctgactggtcagaacacctcctgcatccccccagcctctgggctcagccctgaagctactgtggctccaacggggagggcctgggcaggggcttcatgcagtttgcaggcagctggcagcttccccggcacgtctggggtgggactcccagctccccgtcgtcggattacaccaggcaggttggcgggggtattgatcaactttggaaattggatctgcaaattgtgctttctcaggccttgcagtgtcctctcaggaatatttgatgactctttggaccaggaaaggacactggcccgaaagtacctggtcattccttccctacttgtgtgggccaccatggctccgagggcccaggccatcttctgcctgagagaagtcaggtcacctccagctgaagctcagacagacctcttgacagcccccaacacctccgaacccctccctcttccccattatcccgcaaatcatgcagtcctcccatctgccctcactgcctgcccgctgctacacagcctgtcatgaacctcacctccatggagcattcctggagatccccctcctcattggcaacccctgaccctgtgccctaccacatgcacgtctgcctcaggtcaagcagggttcttgcctaggctgggcatggtggggcacacctgtagtctcagcactttgggaggctgaggtgggaggatcacttgagcctggaagttaaggctgcagtgagctgtgatcgcaccactgcactccagcctgggagacagagcaagatcttgtctcagaaaaaaaaaaaaaaaaaggagtccctgcctagaacttgcagctccctgcacagagcccagcctccctcctgcctcccatcccctctgcatgaggctgggctgctgctgcacccaccatggtctctgccaacccgctttggagaagagcaaacagtttaaccaagtttccctgatgtggaaatttccggggggcccccaggggtgaggctgtttggaggcacccgttgtcagggttttgctgagaggcagggcagctggcagttgtcccttcctctgctcctgatgtggctggtggcctcccaacccctgatgaaggggtcagacataggtctatgagggagaagggttctggctgaagtgagtgggaagagagaaaggtggcaggtgacacctggcttttcccagaaagcgtgggtgagacacctggcccccaagggccccaaggagaggggcaggtctatgtctgtcccctaggggaggcctctggggctgagtaggaatggacagcgccttgccctgcccctggccttgtcctccaggacaggggacctcacaggtttttacccctcagcaaaaaggtgaacatgggaggttcccagccacgctgactcagaggctgacacttcagcttagcatgcgctttagagatgcaatgtgggggaccataccacttcagcctcactgggccttcccttctgtggaacctcctgttcggccccctccaatgggaaagatctcttcttttggatttccttcttttttttaattttttttggagaaaaagtcttgctgtgtcacccaggctggagtgcagtggtgtgatcttggttcaccacaacatccgcctcctgggttcaagcgattctcctgcctcggcctcctgagtagctgggatcacagacgcccagtaccacgcctggctaattttatacttttagtagagacagggttttgccatgttggtcaggctgatctcaaactcctgacctcaaattatccccccgccttggcctcccaaagtgctgagactgcaggtgtgagccactgcacccggtctcttttggatttcttcaccctacacctcccaaggaatcccagttcaggacctcagggctctgtgaggtcctcatggccagtagcctcacccggcaaagggaaccaggctggggccggggccactttgcatgtttgggtggctgcaccctgagactcctttctgatagtttatctcctgcccttcctggctgggagcagggtgtacagtgccctatttctggggcaggatcagaggctcattgtgggggctgcctcccagggccatgcatgagttccaggtggagaggtgctggcttgcacctcactgacctgggactgtcaagggtctgatggtgacgcagtggtggccagccttgctttaggaccaagagttctgttcttatccttgatgctctcacgagctgtccgtgggggttactggctccctatttgtcacagtcccgactcacctgggccttcatggtcctagtaggcccccaggggaaggggcttcagctctcagctcatggctccagctgcccagcaggtcctcagatggacccgtccactcagggacccacatctctggagcacctgccatgcattaggcactgtgcagggccctgggacatggcacggccctacctgcctgtgtgatgttcatccatcagtcccaacaacaaaagggaaatgctctgtggccgaggctggggggagggatggagggttggagctctgtgggggctatcccggagggcttccctgggaagggaccttggagctaggggtggaagctgaggagtccgtgaatgggataagaaggtggggatagcacccactagggaccaccagggcctccagggcaaagtcccctccaatgtgagagatcggagaggtccggggggctaggggttatgggagggatgaggcagagtgtggggcagggagggggctggcgctgctgtagtgaattgtggttttgtcctaagagcatgggaggcagccagagggctctccttcctttcctgcagctgggtgccagagagtcttgctgagaaccagagagaacttggcttgcaaggtcacggtgccaggggccagccatgggagagtgaggagagagtgtcactgggctcgggaaaggggtcgtccctcacctcagtttttccatctgcaaaatgggccctgccttcatctcaggctgttgtgagaatcagatggaccagcgtggggaagggtcagggtgctgtggggtgggaggtgtggtcaagtgcaggggccagccgcctggtcctgggagggtcagggcacagcggggcagggcaggctcaccacactgccctggatggtttagaagcagagagcatggagaatggatggattaaagcgaggcccatggggctgggcatggagggctcctcctttgagctggcgggcgtgatgctttgctcaacctgagcggtatacagttggcactccatgagtgcatgctggctcagtgctgcagcaagaagctgaggcccccagaggcctacagtgattcctgactctgcccctccctaactgtgtggccccaggcaagtcgctgaccctctctgagcctgtttcctcacctggttccgagatctacctttggcggctttgcacttgtactcaggataaaactcaaattctgcacaaggtgtgatcagatccaggtggcgtttccagccacagctggactttgccacctctcttcaggcctgttgtagtatcttcattccactgaggggttctgcgtaaagttcgtctgctcccacccccagcctatgagttccatagagcaggccttattcccaccttactcagtgtgcctaccatgcatgcttggcatgtagtaggtgctcagtaaatacttgttgagtgagcaaagcctcagggaaggcaggcagggggccatcgcaggatgggctatgccggctgggcaggcctaggggtgtgggattctccactgacccgaggccacgaggctacaccttggaggtgccggctggcaggacgggttgttggtgggttttctcccagctctgccagagatgcgggggacaggacctaggctgtagtccactgcatagggttgggggctacagctgcctcaagtctagggggccctccttggcctcccgtacacaccacctccatgaagtcacaagttgtggccttgcccttggccatggccacccttggctggactcgatcccaccatgggggaggcctgtgctgaagcccccttccccccactgcaacccgcatcccaaccaaagatgggccggcctttctcggcctcctctcccgacagcggcctgcagtgggaagctggagcagcacacggagcggcgtggggtcatctacagcccggcctggcccctcaactacccgccaggcaccaactgcagctggtacatccagggcgaccgtggtgacatgattaccatcaggtaggggcacccgggggtgtcggaaggaatcaatgtgggcccacgtgcatggggtgggtgagaatgtgtgtgtgtgagcaggtgtggagggcacacgcctgagggtgtacatgtgtgtgagcaggtgtgggatcatgtgcatgtgtgtgagcatatgagtgaggcgtgtgtgagcactcgtgtgaacaggtgtatgggtgtgtgcatgtgtgtgagcatttgtgagtaggtgtgtgtgcatgcagatgtgtgtgtgtgaggtaggcgtgtgtaggtatttgagcaggtatgtggtgtgtgcatgcatgtgaacacatgtaagtaggtgtgtgtgcatatgtgtgtgtgtgcatgtatgtgaacacatgtgtgcttgtgtacatggaaaagcccatgtcggagaagacataaaggacacatgtgagagactgcatgtgtgagcacatgtatgtgcacgagccatgcctgcaaaggtgcagagagcgtgtatgtgcgcatgcatgtaagataacaggtgtaaccatgtgtgaaccgtaagcatgtatgtgcacatgtgaatgcatgcacgcaagtgtgtccagtgctctgggtctccacgggcctctgtggcgaggtgcccaagctggacctcttcctggtttgagcctcgttcatggggtgtggggggtctcagtcactcagctctgccaggaaggcagggccagcacacaggccactgggaacacagcctgggactggtgggcatggtctgatgtctctgaggtggcagaggtgtcctctctgtcctgcaggggtggctgggggccaggctggcactgagcccagagcatggtttctggagggggccttggggaggggagtgaatcaggcaaagcccgggtgcttgagctgcagggacatgcagagggaaagggggccaggcagtgagcggtggtcctggccaggggtggtcacagggacatttggctggggagtcactataggttccatctgccatagttttcctaaatgccagagcccaaaaagcgcaacccctgacttactccatagctgcaatgcgtgaggatgtgatgggcatgggcagggtctatcctagtctctgtgcctcagtttccccaagggccaggtggttcagggccagtgtatctccggagatgacaagctgtcaacctgctgcagccttagccagccccgtgggcagtctcaccctcacttcccatgcctgggactttgtgctgggcccatcccagtggtcccgaggtggagggttctgggcccttgggccactgcccttttggggagggtgtcggggcagggggctcttgacttcctgctccacttcggcttcgggctgggggtactgtgtgcactgatggagggaaggggagccgcagcagagctggaaatgacctgcgtggatgtcgcaattcttcatggagcctcccgtgcacacctggatggggacagtgtggggacagagtggctgggagtggaggaaccaggcagtctggaacatgaggagtgggggcagccggccgggacagggctggctgtcctggccgtggctccagcctgaccactccctgctggtcctcggccatggagatcccacctactgcctcatgtctgggtcctctccgcccccccgcagcttccgcaactttgacgtggaggagtcccaccagtgctccctggactggctcctgctgggcccagcagccccaccccgccaggaggccttccgcctctgtggctccgccatcccacctgccttcatctctgcccgcgaccatgtctggattttcttccactcagacgcctccagctccggccaggcccagggcttccgtctgtcttacatccgaggtgatggaggctgcagggcaggcaggacaccacggagcacaccgtgcatgcccacaggctcccggcccacaggggcggcaccctccacagggccccggctccctgtgggatgtcccctgaccgccctgtcaatctcaggacagtggcaggactgggcatgcggatgccttggacctctcaaggtcactggccccacttcccagtcttggctagtcctgggaactcacccctaaccccaggctcaggtcagggacagagcccaccctggtgttggaggggtctctgctgccacagtgatggggaaccacctgcccgcttttggccccaggccccctggccgaagggaggctcttctgtctcctgactgtcccctgctacgtctccaccccacagggaagctgggccaggcatcctgccaggcagatgagttccgctgtgacaacggcaagtgcctgcccggcccgtggcagtgcaacacggtggacgagtgtggagacggctctgatgagggcaactgctcggcgcccgcctccgagcctccaggcagcctgtgccccggggggaccttcccatgcagcggggcgcgctccacgcgctgcctgcctgtggagcggcgctgtgacggcttgcaggactgcggcgacggctcggatgaggcgggctgccccgacctggcgtgcggccggcggctgggcagcttctacggctcctttgcctccccagacctgttcggcgccgctcgcgggccctcagaccttcactgcacgtggctggtggacacacaggactcccggcgggtgctgctgcagctggaactgcggctgggctatgacgactacgtgcaggtatacgagggcctgggcgagcgcggggaccgcctgctgcagacgctgtcctaccgcagcaaccaccggcccgtgagcctggaggccgcccagggccgcctcactgtggcctaccacgcgcgcgcccgcagcgccggccacggcttcaatgccacctaccaggtgaagggctattgcctcccctgggagcagccgtgcgggagcagtagtgacagtgacgggggcagcctgggcgaccagggctgcttctcagagccacagcgctgtgatggctggtggcattgtgccagcggccgagacgagcagggctgccctgcctgcccgcccgaccagtacccctgcgagggtggcagtggtctgtgctacacgcctgccgaccgctgcaacaaccagaaaagctgtcccgacggcgccgacgagaagaactgcttctcctgccagcccggcaccttccactgcggtaccaacctgtgcatcttcgagacgtggcgctgtgacggccaggaagactgccaggacggcagcgatgagcatgggtgcctggccgccgtgccccgcaaggtcatcacggcggcgctcattggcagcctggtgtgtggcctgctgctggtcatcgcgctgggctgcgccttcaagctctactcactgcgcacgcaggaatacaggtgggcgctgtgcccgcagccaggggaccgggcttcttcatcacccaggcttgctgtccccgtagctgtgggtttgcaaacgggggcctggactagctacatggaggctgccctggtgcacactggggtccctatatcttggggtgtctgggtggagggtcgtcctggaatcctgttgttgttcctgctgcaggtcccgggcagcccagtcatgtcgccctccgcccactgcttctagggccttcgagacccagatgacgcgcctggaggctgagttcgtgcggcgggaggcacccccatcctatggtcagctcatcgcccagggcctcattccacccgtggaggactttcctgtctacagtgcgtcccaggtgagcccccggagggcgtgaggcccctccggggccacttgggacagtgtgcggaggaggctggtccaggggtcacaggagcaggaggcaaggcctgcgcagggtgacctgagggcccatggccaggtggggggggtggacaaggtggtctctcgggtctcaggtcccttgggggtgtgctgtctcctgcccctgagcagcctgtctgccccctcagccgcatccccccgcccctaccctgctccaccccacaggcctctgtgctgcagaatcttcgcacagccatgcggagacagatgcgtcggcacgcctcccgccgggggccctcccgccgccgcctcggccgcctctggaaccggctctttcaccggccgcgggcgccccgaggccagatcccactgctgaccgcagcacgcccctcacagaccgtgctgggcgatggcttcctccagcctgctccaggggctgcccccgaccccccagcaccgctcatggacacaggcagcaccagggcggccggagacaggccccccagtgcccccggccgtgcaccggaggtgggaccttcagggccacccttgccctcgggcctgcgagacccagagtgcaggcccgtggacaaggacagaaaggtctgcagggagccactggtagacggcccagctcctgcagatgcacctcgggagccctgctcagcccaggacccgcacccccaggtctccactgccagcagcaccctgggcccccactcgccagagccactgggggtctgcaggaaccccccgcccccctgctccccaatgctggaggccagcgatgatgaggccctgttggtctgttgaccgctgggctcgctggtgaccgccacagccccgctttgtaaccagggaatacacagtcatttctaccctgcctctgcgtcctttcttatggagaggccctccggggaccccagcggaggggctggcccctaagccagctggctgcactggtgggcgggagctgtgggactgaacggcgggggggagaagagtggagtggtgagcccgtctgcagggtcccattgtacacaagcaccctggggtctcacttctctccccccactccattctgggaacccatttccagagaagcaggggaccagagcctttttgcttcatctgccctgcagtggcaacagctgcccctagagctgggagttgtcatgaggatggggccgggccatggggacgctgggtctcatccgtggtgactattttgctcacgcctcaccctcttcctgtccagcaaggcctctggaggacctgggttgggtggctcctgccaaaccctcatgcccctggccaggcaggcgccctttgccctccctgaaggtccaatctcctgggcaccgtggaagggctggggtgtgtgcctgctgtacatgaagcccctggagttccctgcaggcctcaaagcccccaggacatgctgctctgtgctttctggggacagagaggccgaggcaccaacagcagtggccacgtctgttccatcctatctcagggcctcggtttccccacctgtaagccagggtgagactgtgggctctgaagtcctgaccttcactctgtggtgatttacgggaagaaagacaatcccagcctggagcccctgagctctcctgggtggccgagctcagactggcatcgaggggcctggggtaggggcggactgagctgctaccccatcctcgacatccctttagggcagggggactctgggtgccatggtagggagcgcctgtgtcaagcagcaaagccccctaatgtcaagagcctcctccagggcctgccacggcatcttcctggccagcaacatgtgtgcacccaccgaggtacgccccagccactcccatctgtgcccatcagggactccccatagcacgagcgaacagccagccctgtttatttataggccttttcaggaagagctagcagggcagtgctaagacaggaaacccagtccacattttagggcttccttaaacaggcttctgagagtcgtatcttttttcttttttttccagaaaaaaacaaaacaaaacttttttgccaaaacacctcctcaataaacaacatgtaaacagaaacaactgcttcagtctctacaaaaatctcattgtggcttcgagggcttgtctgtggcaggcagcagggagggtgggcaggggccattctcctcctcttcgggggcgtcctgggggtagaccacgaaacacagctcctggccccagtgtgtcatggactctgaggacagacagatggaccttggggcctgacctctcgggataggggtgacccccagctccggacacctccccttgggcaggggtcttcagggagttgctccgtcggtacccgtggttctggaaactttgggtacatcttgggaagagacatttggtggcggctgggccctgtgttcccacctcagctgctaggacaccctgctctggggtgagcctctaagagggaggtctggtctccaggccccggccccctgtgctgggtgacctgcagctgcccggctcacctgtgagtctgtgcacacactttggtttgcttctccagaacactcccagaaagaaaatgggcacccccgtaaggatgatgatgacgccgaccccacagaccataggctctgagatgaagctgaagaccagcaggaaggcccagaagaccaagtacgccacggggatgagaaggttcacctggggaagggggagcagaaacaccgatggtgcagggcctccagctgtctgtacccccgacccctgggggtctggggaattttcctcccttccctgggagctgaggcctgaagggcaattgcacccactacaccccctcttggcgacagcccagtgtgttggaggccaattcatgggtcaggccgttggccagttttgctgaggatttttcaaagtctcagcggcaccgagctccacacagcggttgcgtgtggacttgaggcttgcacttggctggaggtcagtgattttttggtgtttcacatttcaggcactgagcacttctccacttaaggatttatacacacatggggggctttgcttttagctcaggctatggtcttctgtttttgtgtgggctcatgaaatcctggcagcctttgtgaccttgaacagttcctgagtctcattttctttaatttttttttttttttgagacagggtctccctctgtcacccaggttggagtacggtggccctagcaccgctcactgcagcctcaacctcccgggctcaagcgatcctcccatttcagcctctcaagtagctgggaccacaggtgcgcaccaccacaccaggctaacccttttatttttaactttttgcagagaggaagtctcgttatgttgcccaggctggtctcaaactcctgggctccagcaatcctcccacctcggcctcccaaagtgctggaataggcatgagcccctgtgcccagtcctgagcctcattttcgccatctgtacactgggagcattcaaagctctgtcctcatggggctgctatgaggaatggctgcctcagtgcacagagagccctgagcagggcccaacactccacaaaagctggcacctcccatcccacctgcccctggtgcccactgtggatgcaggggtggctctggcagcacccggcacagggccagctgtcccagggcctcaccttgatgggcctgtggagtgcaggccgcctccagcgcagcagcagcaggcccaggatggtgacgccgtagcagaggtagttgatgaaggacacatagttgatgagcgtgtacgtgtcgcccacgagcatgatgacggctgtggccccgcactgggagaggacctggggctgacggctggcccctagcctgcctcctgacgcccctgcaggatgagccctggccccacccccaacccccaccctggaatggctcacccctgccattacccggaaggtcctgcattgccgggtagccctgcctccacgccctgcctggcccaggtcccccaacttacacagacgaggagggcggggatgggggtgcagtgtctgacgtggatcatggccagcaggctgggcaggtgcccctcgcgggctccagagaagcacagcctagcgttggggacagatatgggcactggccacatcctgggtctcagctttggacctgatgtccctcttaagctgtcgcctctgacctcctgctccgggcccagcagccccactggacagttctccccctcatccagcctgcctgcctcttgctttctttgcctcccagttgtgatcagacacttgttaccgtgtgggatcatcatcccagcttcaggcagacccctcccccggcaggtgtcccttcctctggcccacggcatgactggtgcacacctgcaccccagccttccctccccatgcccacgtctccccagtgcagtcacctggagtaggtgaacaggtaaccattgatccctccgaaggttgacagagccacggagacaggcatgacccaagaaaagtagcccagcagcttctccccgaaggtctgggtgggcacagtagagaggccatgtgtaaggccggggcaggggcctgggcaggagccagggaccgagcaggggcccactcaccacagccaccgcattggaggagagcagctcctggggggacatggccgtgaagtaggcaatgttggtgaacgtgtacacgaaggtcaccagtgggatggagatgaagatggcgcgaggtaggttcctggtgacaggcagtggagtgcgtcagcgtcagctcctgagggtgcaggacccccgagacccagccacgagagcagctcatagtctccatctcttgtgtctgctggggatgttggggcaggaaagggggcagcattgctgcccgagacacagggaccctgttgtctgccctgccccacccccacctggacacaggctggtaggatgggagatgggggaggggccccatcacatcctgaggacagggtctgatgtctgtgcagaaagataaaatcgcatacagccaaaatcagcctggaaaattccccaaaatggccccagagcccagtccacagacccagagtcttcctggaactttccagtcccagctcgctcagctgcaaaggtttactgtcgagatccctggccgagcatcagacgcagtcattggcttcatttgtagggaccatattgtgtgtatatgcataattttaggccaaatgcaaatctctggatctatttacagcaggatgatgatattcagcctttctgaggccctgcaaggggctgtgacgtgtccatagccagagagaacagggccaggctagaatgcaagccccccggctttcttcccagggccatttttgcagggcaacaggcgtgggccaccgaggaccagcccgagccttgggtggcagtggggctgggcggagaggctgcctgtcccaccagagggcctggctgcttcccagggcccagttgggggccccactcactttcgggcgtcaaccatctcctcggtgacatagttgaggaagttccagccactgaaggcgaaggagccctggaggaaggccagggccaggtgtcccacggagggcgtcatccagaaagcaaaggcattgctgggcctcagctcctcgaagtgtcctggaggcccagaagtcgggggtcagcaccatctccccagcccggcccttaccccgactcggccctaccttggaagatctggagaaggcccacgccgatgatgagggacaaggccagcagcttcccgcctgtgaacatgtcctggatgcgcgtggcccagcgcacactggagctgttcacccatgtcaggagcactgcggagggaaggcgggggtgggcgccgaggccgggacctttcacagtggaccatggccaagtccagcccaggcggcccgagaatggcatcccctatagcagctggaattttctgaagggaaatttcacccctctgtcctcctgctcagggcaggatggagcccgggcaggtggctgatctggggacagtgggccaaaggggatgcttactcaggcaggccatggacagcacccgggaggctgtggtgggggggatgcagttggggaacacgggctgcagcacgtagttggagaaggtcatggagatgacagcaaggctggtggggtacatgatgaggacggcgctccagagcagcagaaagctggaaggagcaggggcgggagtggctcaagctgcccagagcccttcccggccaacctggccctgatgtgtgcagcagggctgccctgggcctggcgcccgggggctggcgaggctgccagaggccagcaccggtccagggaggcagggttgaccttgttgaggtcttgcggctgcattgatagactgttttaacagagaaggtgttacccgtacttaaacattgacaaggctgctgtggggcaggcgctgggaacaacataggcaccaaacgcttttcttttcttttttctttttttttttttgagacggagtcttgctctgtcacccaggctggagtgcagtggcatgatctcggctcactgcaacctccacctctcgggttcatgccattcttctgcctcagtctcccaagtagctgggactacaggcgcctgccaccatgcctggcaaattttttgtatttttagtagagacggagtttcaccgtgttagccaggatggtcttgatctcctgacctcgtgatccacccgcctcggcctcccaaagtgttgggattacaggcgtgagccactgcgcccagtcaccaaatgcttttctaataacaactaggccccccattggacggaggctgtctcctgagccagggtccctgtccccagacctctcggcttcagccctggctctcgcagagtactgtggctgaagatgggtgactctgagctgtgttccccctgagggagacctatggggtgcagagactagaccttaccaagagccctagctgggggtggagagtgatggatgccccttctacctaaatcttgcctctgcagggcacccagactgtgagtctgacctgttctcaggggctttcctgcacccaggggtgggtctgcccttgggggtggtcctagcccctggccagccctccagggagaggactgcctcatcggggacatcagccatctctggatcacctgccccttgctctgcacaaccatccctgctgggcttctgggacatcctagctccatggccctcctcccctgccaggcatcccctctgcccatccccgcatgttccgtgcccagggatgaggtcctggccctcttctccctcccgaacgtcctctccaggcccgaagcatgattattctgctttcttgggtcccagcccctttgaggaccctctccccagaggagactgccacagatgcacccacagcagcgtgcaagccctggcacgtctccccatccaaggctgcccagttaagggtccccggcccatatccctcagaaccaaactttgtaaatttcagcccagacttttcctctgagccccagaccatctaggagcctctcagtagggaagtgggtgccacctccgctgcacccacctctccctctgctatgctggctgccctatcctctcgaatcaggctcctaaacgattttagaatctgcctgtacctttgcagctcttggcacaacgcagctggacaaatacaacagcttcaatcccctgatgctctccaagccccggcacctgccgtaaacccaacctgacctcacctctagctacagcagactccctgcgctcacctgggccaccacaccctctgttcacacttcccccatcctgggatgctttcctcactggtcagctaggcccggtggggaaaatcttcttcctcccagccttagggcaagcattgctttcctgggagtcctccctagatggcgcacaccgttctctttgctgtgtagctgctgcctcttgtacacactctcaaagcaaggctcatccaggccttaatcccatttaaggggctgcttcctctctgttctgtgagcagcttgagtacagggacagacctttctatcactgcctccccacccccaggctcacggtaggtgctcagcaaatattccctggtgaacgaaggaaggatagcagggtgctaaggaaaggagacctctggctgggtgcagtgcctcactcctgtaatcctagcacttgggaggctgaggcgggtggatcacctgaggtcaggagttcaagaccagcctggccaacatggtgaaaccccgtctctactaaaaatacaaaaaaattagccaggcgtggtggcgggcgcctataatcccagctactcgggagtctgaggcaggagaatcacttgaacctgggaggcagaggttgcagtgagctgagatcacgccattgcactccagcctgggcaacagagcgagactctgtctcaaaaaaaaaaaaaaaaaaaaggaccttatgcagggtatatggtaagaatatcacacttccttccttgctcctcatgcaacatatgggtttaccaaaattgaggcccctcctcgcctgggcactcacattacctagggttttcagacagtaagaatcccccctccttaagtacaaggcagggggtggggttcagagggacctctatttaaaaggagatccagagaggcccaggggcctgcaggagtgcccagcacacatcagtggggtggagtgggcctcagttccacctgccctgtcctcagaaggctgtccagcacccccacaccttctctccatccagcccccacaccttctctccatccaccccccacaccttctctccatccacccccacgacctccctaggaagccggaagcaggagtggaaactgatgccagggctcatttggccatcccattcccaagagggtgtccccctgcccgctggtgccccacactcacccagccaggcccccgaagatctctgtgacgtaggcgtagtccccgccagacttggggatggcgactcccagctctgcatagcagagggagcccagagccgtcacgcccccacccaggacccagacgaacagggccagacccacggagcctgagtgctccaggacccccttgggcgagatgaagatgcccgagccgatgatgttccctgcagggggagagatggggaggcatcaggcctggggtccccttcgcagcccggccttctgtgtggggatctgcctgctgccaggaggaagacagcccggggtgcttcccggaggaggaggaggcaggaggtgggctggaggtgttgaatgccactggcccccaagcccagcaagtgccattctgggctcatcatctgccccttcctcagtccctcacataggaaatggcacctcgttcagctggccaggcccctctgccagagacaggccctgtttgactttctcagccctccattgcccccgtgaggcggggccagcaaagtgaggaggctgaaccacctgagcgacggcagacggtggctcctcaggcaccccacaaggcccatgctcagccctcccgtctacctcagagccccaggcatatcagcatgcagccacttgtcctgcctccatccagcccactggccagagctggcccctaacacaggacttcaaccactctcctgccactttcccaccggccaaagtccagactcatggagtggctcaggaaatagcatctcctccatgaagccctccttgaccacatcaggtttgggcttctcttcctacttcaatttcctttcctttcctttctcctttcctttcctttctcttttccccttcccttccctttccttccctccgcttcctggattcaagcaattctcctgcctcagccttccaagtagttagaattacaggcatgagccaccacgcctggctaatattttttgtacttttttagtagagatggggtttcaccctgtggatcaggctggtctcgaactcctgactgcaagtgatccacccgcctcggcctcccaaagtgctgggattacaggcatgagtcactgtgcccagcttctttctttcatttagacagggtctcgctctgccaccctggctggagtgcagtggtgcgatcatagcttactgcagcctgggactcctgggctcaagagattctcccacgtcagtctccctagtagctgggactccaggtgtattaccacacccaggttttttttttttttactttttgtagagacaggttctcactatattgcctaggctggtctccaactcctgggctcaagtgaccctccctgcttggattcccaaagtgctaggattacaggtgagtgccaccacacccggctaatcaaaaaaaaattgtagagttgaggggtcccactatgttgctgaggctggtctcgaactcctgggctcaattgaccacccacttcggcctcccgaagtgctgggattacaggcgagagccactgtgcccagcccctctgctttctgacatgatgggaaacattcaggggggccaactatggtctgtagagtaggttcccaggatgagcaagactctgagtgcctgctgagccctgagctccgcaaagagggacaatgttctgggttatatgggtctcaccatctgtgcacatgaatccggtaacttcaccagagatctgcactagggcctgtccaagaagaaataaacccagaacctcagaccatatgaacaaacagccctggtagaacctgtaggtcctggtaggaccaacatcgttctctatgcaatggccacaccagaccgggtcctgagaggacgggtccatctccctcagagcgggagcccgcctcctccacctgccgggcccgcagggggctggataaggacacggttgtagctgccaatttgtattcactccttgtccacggtgctcccccactgcccccacccccagccgacacagatttccagtctggacagctacgacgccccactcagttttccagtcacatcccaggagccctaaatacatccagataaggacgaactaattcctgtgccccagcccccagaggtaagctgtacccttagtctacttctcgggggagagagagaagcgcctctctcatctagcagaggggcccaggcctgggtgggctgtaaggtttctaaagagcctttgagttccctccatccggcagcagggcctctgttctcaggacctggcggactgggatttgccgaaagccagggaggttggaagccagcgggggctgggtggccttggaaggagctgagcatgttcacgctgggagcatcccaggccctgagccacccaccctgcagagagcccaccatgcttctgcttggtggggcctcctgggtggagctccggggtaagccacatctggcaccctatcttccagggctgtatcactagccttgtgcccagtggctgaagactcagatactgggcttgccaggggtggagaggccactattgtttggaacacgtggcctcaggccacagttcaggactttctcccttgtggctcaaaggaccacaggcgttagccagtgtctctgaggtcctcaggggtttctccctctgggcctagaccactcgcagcatctccctcaggatcatgtttgaaggtggcagaaaatcgcatcacgcactccgcacactggctgctcccggcaccatgaaggatgggtggggcactgcatggagcagccggggctgcgggcttgggcacggaggagggagggggctgtggacagggatgggggcctccaatgctctaatgattataggaggggtatgggagggaccggtggatttctttctttctttctttcttttttttttttttttagtagagatggggtttcaccatgttggccaggctggtctcgaactcctgacctcaagtgatccacccacctcagcctcccaaagtgctgggattacaggcatgagccaccacacctggccagattagtggagctggaagggggctgccctgggttcctcccagtggtgtgggaaggtcggagggtctcccttcccagactctgtatttcagccaagcagatctacctgattcggggagcagcaatgaagaagcccagccgttgggggaacctggtttagaggggcaggaactcagagtggaacaggatgagggggcacgggatgggcctggagataccgctgagcccctgttgggtgtctgacccatggctgaccagagagatgtaggttctgaggcctccacgttcctgtccacccggtgggatgacagctcagtggtccctgcaggtcctccgtgggccagagctccgggcaggtaggcgaggaagtgactgccccccaagtcggccttcccagagtctccaccacccgcccctcttccctgagccttcgctgggtagcttttatcacattaagatgtttggcctgatggggcttactcagcttcttggaggaacgaagaaagggccattgttccccgtggccgctgcggtgcatgctgacctatttctggaggcagcggcagaccactgaggtcacaggggcggcccacggaggtcgagtcgcagagtgagccacctcctgtggtgtgtggggaatgtgcagtctgatttggggagggggcagggagggcctgtcaggccaggacactggcaccagtcctcatgccttgaagcacattctggacccgactgtgtgactcaggccagtgctgcccttccgagccccagtttccccatctgccaggtggggccactgggctagggggcagcagagggctagtccaaccgtgacttcagcagaggggatgcaccctgcatatctgtgctgggccaaggaaacagtctgctcagggaacatgtccctcactgtggcaggcctctgcccagctcactggtctccctgaagcagcaccacctccaggaagctcttcctgaccagccaccctggcccctgcaatctggacatcgccccacggccacggtacctggatgatggctgggaagggatgcttttatttgatgcaggcattctcttgatcccgtctggcacatcagaggccatgggaagtgcttttggatctccctacgcactgccatctgccttggagaccccctaggcagccccatctttcctctgagacctgagccacccgggaccccaacaccccggggtgatcggctgcggcctgggtgaagcctactcgcctcaagcgcacgggtgtcctcacatcctcacggtaagcctgtgtcaggtacctctccgggatgctgactgtgactactgaggtctgggcagcaccccaaggaggtgagtggggacatccaggatgtgcctggaactgccacttggccggcacccgactccagcctaacccactttcctttggagacaggagatgagcggaagtgtgcggccctctccggctcgttcggctcagccagcccagccaagcaaacctcgcccagggccctgtctcctggctgaggcttctcatggtcaccggtgagttccacgttgccaaacgcaacagtcgagccctaggccacgttattgacgcatcagcaacatgtggcaagtggattgcttcctcctcactcggcctcctggcctcccctcggccttaccggcttctccttttcagaatcccttatcttgcttgacttccagacactgggtgcccagggctcagtcctggggcttcttctcttttctttctatgctttcttgatagatagatagacctcatctattaccttgacttctgctggcaactcctaaatttatatccctagcatagactgctctgctaaatgaaatctgtatatgcaacgaaccactcagccgcggacatcacagactttccgtgttcaaaacggaattcccgacttttacctccttgcccccagaatgctcctctcgatcttccctgatgaataaatggcaaaacgtcctcccaattgcttgggccacaaccttgagtcacccatggttcctctctttctcccccaggacctctattccatcacaaatccttcggctctcatcttccaaactcatccggaatggaacctcctctgacaccaccatggccaccgccctgccctgagccaccgtggtctcttgcccggggagacccaggtagcctcctgaccggccttcctcctcccacttcttcccccactgcctcttctccatagtgggccctgtaagccccatcccatcatccctctgctcaaagcccagggctcctgcttcacagagagcaaaaggcaatgcccttaacatagcttgcaatgccttgctcacactgaaccccaccccagatctcagctcatttccaagctgcaatccccgaccctggctctctccatcctccttcctggctggactgtctggtcttagcacttaacaatacacacattcagcttgttcatcttgttgcgggactcccacaccagaagatggattttgtctgtcttgacccccccatggtgtctctggcatgtaagccagtgcctgacaccgttcagtatgtagtggttgaataaatggatgagtgtgcccaggactgacaggtccccgaaattatagttggggcttcccttggggtcctggagcacaccgagggcatctgaccccagggcaggttgcctcagtttcctcacctgtaaatggaactgtagtggggaacagctaagcccctgcacagttgtatggctcctcagggccccggtgaggaggggctggggttctgcagaggtccacccctctgggaagcccagccacctgcagccctggagaccagggagggtcctggctgaggctgggtgagcagggattggttcctgaggagttgaggttcatgatgtcaactcctgagtcactgaacacacatctggcccacaaacccctgcaggagccggactctcaagtcaaagagagagcagaggaagggcctggtcagcagacccaggggggactcccactttggaggatctgggtgtgttccttgggttgtggatccggcaagggagctggccgaggttcctgggtcagtatgagaggccctgtgagtccagccgccgatggggaggcagacttccctggccgtctgtctgtttgtccacccatagtggagcaggagctcagtgaagcctagttggacaagctcccagcttggtccccaaccctcccccgtcagggctctgactctggccccaatttgcccagcatcagaacagtataaagggcactgggaccgggcatgatggctcccgcctgtaaccctaacactctgggaggctgaggtgggaggatcacttgagcctaggaatttgagatcagcctgggcaacatggcaaaacccagtctctacaaaaaatacaaaaattagccaggtgtggtggcgggcacctgtggttccaggtgtttggaaggctgaggtgggaggattgcttgagcctgggaggtcgaggctgcagtgagctatgatcatgccactgcactatagtttgtgctatggagcaagagtttgttttaataaaataaaatataaaataaaatataaaataaaataaaataaaataaataaaataaaataaaataaataaaataaaataaaataaaataaaataaaataggcactggactgggaacagagcccaaatctggttccaaatcctgagcctaccccttggagcagtatcatttcacttccaaccttagtttccactctgtaaaatgggtataaaaattcctaccttgcaaggtgggcatgagattcaaatgagataaaggaagaacatgttttcataaggcagtaagaggtgtttttctgaacagatattggatgtgatgatgtcctgcagagcccctgccccagccagttctatttcctccagcctggccgattcccttccatctgtgcttgcagtggccggcgggcactgccctaaacacactatacatgagtctcacgccagcccatagcccacccttccaggtcttcccattctcaaaagcctcaattcccagtctgagctggagcagagggtatacacgagggagagagtgacaggatctcctaggagggtcgctgtggaagttttggaaataacatgttcaataacaataacaaaccaaggtagattatgaagcaggacgttggctgggcagggtggctcacacctgtaatcccagcactttgggaggccaaggcaggcagatcacttgaggttaggagttcgagaccagcctggccaacatggtgaaactctgtctctactgaaaatacaaaaattagctggacatggtggtgtgtgcctgtaatcctagctacttgggaggctgacgcaggagaattacttgaaccccggaggtggaggttgcaatgagctgagattgtgccactgcactccagcctaggggacacagccagactctgtctcagaaaaaaaaaaaaaaaaaaagaaagaaaaagaaaggaaaggaaaggaagcaggacgtcaagttcttgacttttagagctaaaatatgacactttgcagacatttttgattctgaccaggctccccagggtattggtggagagagagtgagcccacctggggcagaaaggtggggtgggctggggaggggagacccttagtacatcaggtggggaaggcagtgcagaccccagctcagtcctcacctgcccagtccccacctcctatcaccttctggttgaggttgatctccttgttttttcctgcctcgtccagcctcctgcctgctgtaatcctcaaaggctccccgggccaggccaagatcaaggctccccaagaccaccactgagtgccccgggcttgggttctgtagctgaatccagcatccttggttagctaagtggcccttcaccctggctcagtgttcaaggtttggaggccaaggtagtggacctggcacagcaggaaggaactgaagggtaggggagctgtcagggcagacctgggctgcatgggaaacttacagagtctgtcctggaaaaggagggtgatagtggagttggccttctccactcccaccaccaccacctctaccatcaccaccaccaccaccaccaccaccaccaccaccaccaccaccaccagggcccctttctggggagaaaggagccaggcagcctccctgtggcctggggaggatgggatgtggggaggggatagagtaggaagacaggtcaaggatgctgggcttagctgaggagcccaggcagagctgtgtctttctgcacctgcctggcactgtagctggttctaggcatggtctcaatcctatgacccactcatggtgtgagcttccccttccctggaggacagttcctggagagggtgtgggccaagaaaaagctctaaccagcaccctggccaaatccctggaaccagcccttccttccagcagaccgtccatcaggcaggggcatcctaggccaagaagctcccagggccaggtcaggaccaggctctgggagacagcattctaaggggagggggtgagatggcggagtgacctggccaggggctgtgttcaggggcaactctggatgtgaagagctgctaatgtgggggtgggagaggacgaggtgaagaccctgggtctgccctactgagcccccaaactttctccatctccaggggtctgagggtgggaaggcagtgaagacacaagtggctctcactggcaggggaccgggaagactggctggcggtaaggtgagaacagtcgaggccccagtcactcaccccccaaaccacttctcctgtccctccctggaggggctcagaggcactctgtgtagacaaagaaacaagtcagtatccatgacttgggacagagagtggaaaaataccactgccattcccatgacctctgagctctctgcctgcccagaaacccctatgtgggggcaggacatggacccattctcaggtggggactttggagtccagggcctccagaccaggcgagtgtccagtgcccaccaggatcccagctcagggagcagctggccttctgcaggctgggtctgcccactgctgcccccaattgctggctaacccgccccctctcctgggtcctgctgccaaaccctgcagtcattgcctgctctgaacctccgtcccttctgcgcaggctgcgcttgctcactctgctcataggccctcctgctttccaagaataaagtcactgcactgcgtggcacctggaccctgcacacagtaggtactcagactgacccacagtacagaacttggggagctcagcctgccgcagcctgaccagcccctacactggtcaagttcctgcgctaatcgcaggactgcagtcatggccatttcacagatgaggaaactgagggtaactgccttgcaaaagccccgcagcaaaatcgagtcaggaggaagagtccagcggtggaggggacccaaaactcccccaggtgcaggcggccgggaggtgggaacacggagctttggcaccctgggccagcagcccctgacctccccgcggtcatagcgctctctgaggccagactgcaggttccccaggcagacccgtccgagcgcccggagaggggacgcccctcgttcggagcggctgcgcccctcattcggcctccgcccggcgcccgcccgcctgggtcccgctcaccgatgatgatggtgcaggcgctcagcagcccgatctccttcttgagcgccacccgctccgaggcgccggggacggtccctgggactggggagggcgagggcgcaggcctggggttcccgcgcccgctcggctgctgcgtgtggccggccatgtcgctgtcccgccgcgtccccgctccctgcgctgccccgtctgtccggccggccgcccgtcggtccgtcggtccgtgagctcacggccctcgcagccgggacagcgcccacaggcgggcgcatgcgctggctccgggcccgggactgggggccccgggcggcgggggcccgggaggggcggaaggagggccggcccacagccccctcccccacctcccttaaagggaacgccccctcccccagtcccggcctgggaaggaaggagaggacttggggcagatctaggaaggacttcccagttgggcgaaggaagggaccctccagttgcctgagttacatccattcttggggccgggttggggagcagagctccgagacaagacaatccctgctctcagggaggccgagggggacggcaagaataacagctggccgcgtgtggggatgcagtgtgtgctccctttagtactctatgcctgcacgatgtgtgtgtgtgtgtgtgtgtgtgtgtgtgtgtgtgtgtgtgtgtaggagacagctcccagggtgagtccattctacaggtggaagttgaagcccagagatcagtagcgatcgccgagcaagtgcagggctgagaccaaaccctttctcgtgcctcctgaggctcccaggcggacaacctcaggaggggtgggggttgaggtctggaactcctctgaggggtctgggtgtcctatgcaccctggatcaaaggcctgagggtcgaggtgaagatcccgggggctctcatcctcatcacggggacccaagacctgtgacgagtcctggacacggctcgcccaccctaccaggctctgggccacctctggcctgagatcttcactacaggctcctcgtcccaggtcagagtgagggctcagcggactagaactcgggtctctggtgcaggtcccgcgcgatccagcccggctcaagaaggccaggcgacctggaatgcccgggagacacggagaaggaggctgtggtcgcgggagagggtcgggagtgcggggatccgagggaggctgcctcctcccggaagccgtccggactgtgcagccgaggccggcggaaaagatccaggggggccgcgtcggggccaccggggcggcgggcggggcgagcctggcactgtgcggccggcggcggaacagcctttgtttcttcctggcggccgccgcgacgcgccgtcccctgcatgtggatgaggcctcgccgggcgccccgtccttccccccagtggcggcctccgggtttgctggggccctgccaggggtccgacggctgcagggtggaccggggtgggacggggcgggggcgggtccctggcaggggcgggtccctggcagcggcagggcctggaggtgggagcggggcggggccggcgtttgcaggcacacaggagcttcgaagttgggggcggggacttggggtaggagtaggagcgggaggatccagggtggacgtgctggtgggacgccgagggggaggccacccggcgaagctgcatccctctcgcttctgtcgtcggagaccggcattcttggcgccctccacctccagccccagagaccattcagaggccgactctcttaaaggagcctcgcgcagggtaggggcagccctggctccggagacccctgattgtcgcgggtgttaggggccagaggcctcgaccttctggtttgactctccccagccccccagttgccctcgcaattctagggtctgctgggagagggtctagccagggctggtgcaatcaggggcagcttgccaaggggcaggggctggcgcaagcctcgcagctctgaagcctgtggttttcgagggtgtctctctgggacctggaatgtggagtatgcgtttgtgggggaaaggtcggcctagggctttgcacaggatggagtttgtatgttgtcagccaggccccatagctcaggaggtccttttcgtggaattgaactagaacctgcaaatttcaatgggaacaaaaggttagtaggattggtttaccatccaaaaaccaatcagcatgattctccacattaatagagagaaaaaaggaaaacctcaacagatgcaaaaaacagtcatccgtgatgtaaacaaacaactcttagcaaatagaaacagaagagaacctccttaatctgataaaagtatctacctaaaaacaaatctccaagaaaccaagaaacaaacaaaaaccctacagctgacatcatgtttagtggtgaaagtgtgaatgcttttctactgagattgaaaatgagaagggatgttggcacttgtcaatattctatacaatagtgtactggaggtcctagccagagcaataagacaagaaaaataagtaaaaaggtatgaagatagtaaagggaaagataaagctgccattcacatatgatgtgattcagtatgtagaaaaaaaattacaggttaatttaaggaagataagttcatttagcaaagtcgctagacagaagtttaatatacagaaactaattgtattctatatactagaaataattagaaaatgaaattaataatagcataaaatcaaatacctaaaaataattctagtgaatgatgtgtacaatttttatgcaagaaactacaaaacatttctgagagaaattgttaaagacataagctaatggagggatataccatgttcatggattggaatttaaaatgttggtctccacattgatttatagaattgataaatacatccaatgtaattttgatcaaagcaccagacaactttgttgttgattacaaggcttttttggagggatgaaactcaacaagctgattctaaagagtatgtgaagaagaacaaatctggaggacttatactacagtaaggaagacagtgtggcattgatgcaaagataaacaaatctactggtggaagaaaacagaaatccagaaacagacccatcctggtttattatgacaaagttgatattgcagaacagtggagaaaggacgggcttttcaataagtggtggtggatctatatattgaagaaaaaaaccaaaacccttttaatgtcacccttccattataccctaaaaccagtcccaggtgatgtacatgtgaaatgtacgtgtgaaaggtgaaacatcaaagctgctagaagaaaactcaggggagagaatagatacattttcttaaacagacataagaaacacagtaagaaagtgacagattggactacattaagattagaaacttctgtcagtcaaaagacatgattaaagaggaaagagtaagccacatatgagagaagttatttccatacatatggccgataaaggacttctatctaaaaatataagcatatgagttgtattgaaaaatatgtatcaaatcaataggaaaaagttttaaaataggccgggcatggtggttcatgcctgtaaccccagcacttgggaagggcaaggcaggtgaatcacttgaggtcaggagttcgagaccagcctggccaacatggtgaaaccctgtctctactaaaaatgcagagattggccgggggtggtggtgagtgcctgtggtcccagctagtcaggaggccgaggcaggagaatcgcttgaacctgcgaggcggaggttgaagtgagctgagatcatgccactgcactctagcctgggcaacagagcgagactccatctcaaaaaaaaaaaaaaaaaaaaaaaaaacaaaggactttaaataggtgcttcccaaaagaggatgtccaatgactgttaaactcctgaacaggcactcaaacctcatgggccatcagggaaatgcaaattaaaacgagaataagataccactgagtagccaccaaaatggtgaaaattacacacccaatgttggcaaggatgtggagttggtaccaccagtttggaaaaccatttggcagtacctccaaatccagcatctccactctgtattagatgcctcttggatatcacgccacctccccagcccctagcctcaccttggtgtcaaggctttgccacctttcctcccacttcaggtgcaggtacaacctgccagcaccccccatcaccctcagggattctctgatgcccctgaggaatgagataataagggaccaatctggcacccacaaacttgcaatcagaaatgcaggagagttagcacactcgggcctatccttgtgttactgaatggtgccacacagttccaggatctgggcgacttgaacaaagaattggaagagacatatacagatagcaaaaagtgtattaagtgcagtattccactcttggagaggaagagtggactgatctttgtgagatgagatcggcattagtttggtgtactttgggtctttctatatgttgtttttttccccctcttcccaaggctgcctaatctctagccagtgtctatctttttgattgacaggtgtgttgcttagttactttggcccccgtgcgcttgcaccttgcctccatcccataatcctaagtacatacatgatatgcagctcatatgcatgaaccttaagtagctgattatcataacggggttatgttaaggataccttttctctccaatgcacatgcccatctctgaagcgcagccccttactggtttggtcaggatcctgccggccatgggatactgctcgcttttttttttttttttgagacggagtctcactcttgtcatccaggctggagtgcggtagcgcaatctcggtggctcactgcaacctctgcctcccggttcaagcaattttcctgcctcagcctcctgagtagctggtaattagaggcgcccaccaccacgcccggctaatttttgtatttttagtagacagtgggtttcaccatgttggccaggctggtcttgaacccctgacctcaggtaatcctcccgcttcagcctcccaaagtgctgggattacaggcatgagccacggcacccggccctgctcacttttttatcttacttttgttttggctgctgaacctctgctttttgtctggcttcttgctcacctgccccttcaccttgcttcttctgctctctgcttttacttattctgccctttatccaactttcaattccctttgctactttcctgcctcattttccctgttctcctatctcacttggacaatggcagatggataaatggcagatgggagtcagtggataaattcttccctctacctcatcccagatggacccttatgaatcatattccttataaaaacctcttggaagatgttactacaagattcagcatcagctgcctttggcaccaagtggtggccaactctgaaactcaccctcatattggctctcatgccatccctgttcacttcctttcccccttactcttgcttccctgcaattgcatcccccagttaagttctacctaaggccaggcaccctggctcatgcctgtaatcccagtaccttgggaggttgatgggggagaatcgtttgaggccaggagtttgagaccagcctggggaacatagtgagaccccatctctgcaaagaatttaaaaattagctgggcgtggtagtgcatgcttgtagtcccagctgctcaggaggctgaggtaggaggatcctttgagcccagaagtttgaggctgcagtgatgagctatgatggtaccactgtagtccagcctggatgacagagccagatcctatctctaaaaacacaaaacgaaacagaagtaccttctaagcttttgccccaggcactgctttctggagaggacgaactaagatacacccctaggtatgtctccaacagaaataaatatataaatgtactaaaaggcatttacgatatcattcatagcagtcttcctagtagccccaaactggaaacaacccagatagccattaacagtagaatggatgaacatgtttagagtacatgtaaattccggagttctgtgctacaaaggaaatgaacaaattactactatgttgcaacatggtgaatctcataaacaatgttgagcaacagaagctggacacaagattacattttgggatgattccattaattttttttaagagacggagactctgtcgcccaggctggagtgcaatggcaccatcgtagttcactgcagcctccaacatctgggctcaagtgatcctcccatctcagcctcctgagcagctacagctacaggcatgcacccccacgcctgactaatttttaaaatttttttgtagagacagggtctggctctgttgcccaggctggtcttgaattcttgggctcaagagatccagttctgggatgattgcatttatagttctagaataggcaaaatgaatgctgatgttagaagtcaagatagaggtttatccttaccttcttgggggtaggaactgggcagcaatttggggataggaactgaggaggggccctggagtgcagatcatgtctgacttattgatcggggtgctggtttcacgagtatgttcagtttatgaaaattcattaaggggaacactagatgattggtgcatgtttgtgtgtgtaggttacactctgacaaacatgggacattacacatggcctgggcagggtcctgggagggtcaggatctgcatgctgggagggggtctgcggcctgctctgactccctcgtgggtgttaaactcactcagcactcctacgccacttccattctctttgacactcccacgtccagcccaggtatctcctcaggcagccccagtctttccttggtttctaccatcctgaccccaaaccactccctctccaagctgcaagcacctgctagtttatggcctcctttctgcttctgtctcatggattctcagccctggacattgtttctgtcgtgcttgcctccttctctctccccaccttctctggccttgccctgcatttcctgcctcctctctgcaccctccctggacctccccaacaacaaccatgttcaacccttgcactggtgggccaagggcgcaaacacacatgcaagcccctcacccgggaggcctacatatttccaagttagagatgaaactgcacccacgatgcagccctcattcacacccggccctgcagcccgcccctggggcgtggtctcccctggttctcatggccgtcatccactggggtgggagctaagacagtgcccgagaaccctgggtgtgagcacgctcctgactgggggctggcctgggcaccctttcgccacctcgcttttccaacctggcatttccagggcattctaatctcctccccaaaatctcaccaaggagcaggacagggaaggagcgcagacaggtaccaggacaccaggctgcccagacacacacacacacaaccacacacaactacgtacaaccacacacaaccacacactcacacacatgcacagccatacacttacacacccacatgcatgaccacatacacactctcacacactcacatgcacccaaccacacactcatatctcacacactgtcttacacgaacaaccacacactcgctctcacatgcacacaaccacacactatcacacacacgtgcaaccgcatactctcacacactcacacgtacacaaccacacacacatgcacaaccacacattctcactgacatgcacacacccacacactcatacctcacacactctcacacgctgacatgcacaaccacacatacataatcacagacacagtctcacacactcacatgcacacaattacatacaaccacacacacaaccacacactcacacacctgcacaaccacattcactcacatacccagatgcatgaccacatatacactcactgtcacacacatgcacacaaccacacactacatacaaccacatacaaccccacacactcctaaacactcatgctcacaaccacacactcaaccacacacacaaccatatgcactcaaccacacagaaccacctacacggccactcatattcactctcacacagtgacatacacacaaccacacacaactacacactcacaaccacacacacaactgcatactcacacactctcacacactcatacacacaaccacacacacaaccgcacattcacaactacacacaaccatacagaacctctcacaccaccacacatttgcaatcacacacaaccactcacacactcatccacacacgcactcaacactcagccccacatctttgggcctgtggggtctttttttcgcatctgtcctctccgacaactcactgttgttcagttatcaacctttaaaacactcttacgagactgaaattaaaaaaaaaattctttgcatttgctgctggtgacgtcctggctctccagggcacggggtccacagcagagacccccttgcccaggtctaaggttggcctggcctgcatagctggtggggcttctagaatgaccacagggtgttgttccctgtaattttcaggctgtgacatcccacccagccccaacccatccctcctgtgagtggggtcgggatcccagttgccacgcccagagctccgaccaccccacctgggcctttcaccacctccccactcccccgtgcactgcacccccaccctgtcctgggggctgaaacagctcctccccaacccagggctgctgctccgaggtacaaatggaaccctccctgtctcggatcctcttctttcagcgcagccacaggctgtgaatgaccccacaggcaggtgtcaggagggagatcatttaattcatggtccaaactgagacaggtttgcaagtgaaaggaggcactatttataatcacagcagagtacaactgacagatataaaccaggacgtcccagcaaactggatggatggtcactctctttcaagccaataactccgactctgtgtgcccaaatacagcaggcattggtcacaccttgcctgctcctgctgcctccttggccgtaacttgtcacaccttgcctgctcctgctgcctccttggccgtaccttgtcacaccttcatgcttgtccctcatgagtcaggccaggcatcaccttggccaggaagcctcctggtccccagaatggaagacgtgcccattctgtgtccacattgccacctccccaggctcaaaggcagagacctggccttgcccccagcacatcacaggttctccatggaggttccaagtgtctgcctcacgagctgcgagatgcaggttctggtcccggctctgccattgacttacagactggacatggagcgtctcagtttttccctgtgaggtggagaggaaaagggcagcatgtgatccctcgctgcccacagctgttggacgggcagtttgcctgaactcgcctttcttgctccccaggtcctggggtcctaaaaggggcatggaggagggggtgacctgtcagggaggccaggtttcttgtatcttcctattatcccatgtcctcccctgaagccactgcattcacggccctgtgcagcccagtagggaacacgagaaggtagggcttggacttctgatctggaaccgggatctcctctccttccaggggttcccagccctgcatcctgtggggccagcctccgggaccagggtaccctctccgtgggacctttacccatatccttccatttaaggacacccgccattccaaaacgtgccaccagagggcagcctccgcgttggtccttgagaccaggtgcctgagctggacctagtggcctgactctcccgatgtcagagtccgggcctctgctggatcttgtattagagggctggggagaacaggctaggattcctgggcttctccggggaccactagagtcagctgggagccagggaagtccttcctgagagcggctcaggctcttttctgctgtagcccgagagaagagatgcaggggaggccccagggactgtgggtgctggcctgggtcaggacattcatagtgaaaccagagagatcttgcagtgagattcatttcgtgcagcgcacctgcctcggggcagggctgggaggcacggggaggcgatagagcccatgtggtggcggtggctgcgggagggaccggcgcttatctgatgggcctggcctttctcacagctcggtggagccgccctgccaggcccatcttggccggtgggtcggggctccgcaggccccgtgggctcagcctccccacctgcctggtgggcagggaggccttgagcctgggaaaggcgcgggcggccactgctggaggggagcgggcaccgtggggctgcgcgctgcggcgggctccccccacaggctccaagacacgtcaaaaccgggtacaaaaaattggggcaatctacgtgtttacttctaacaaatgaatgcttgtaacgtaaaaacaagactttgcacaccaccggggctgttcggatccgagaacgcatgggttcacgggaccctgtgggtggaggcccagctggatgtggcccctgggtggcggcatcctcagctctgccggtggctgggggactgtgcgtggaaggtcggtgagggaccccagaaaaaagtctaacagccaaaggcggaggttgcagtgagctgagattgtaccactgcactgtagccctgacgacagagggagactccatctcaaaagaaaaacaacatttttggttttgtttttttttttgctcattagctatcgttagtgttagtgtattttatgtgtggcccaagacaattcttcttccaatgtggtccagggaagccagaagattaggcccccttggtctaaggcaaagcagtctcagggtcagaagacctccaccccagctcgggcctgggtgaccctccctgcagagtgcctctctgagagcagggtaccagccacttgcaggggactgagctatctgctggaggagggttcaaaactggcccccagtcctgtgcttatgtgagtcaccagtgggctacccagcgccaccactcaggccctgcagacggatgtctgtggaagcactttcacagcgacatgtcacagggatggagaactgtggatgaggactctccaggctgaccagccggctctgccctgaccatgggttgggaccccaatcaacctagctggggctgggccctgccagaaggggcgcactagcctggcctgaccatgggatggaaatgggacattgtctgggggagaggggagtggggccagccctatgttatctccccttttcaaagaaggaaaaacccggcacagagagagggaatcatcggcccaaggcctcacatctggtaagcggggagctggagtaaccagaccctgaatcctgggggtctggtaaccgtgatcctgggaggcttggccacgtggtcctggggcttcctggccccctcctggcctgaggcactcatcccagccccgttgatttgatgggcagagacccagacctgccaatggctgggtgtggccagcctcgtgaactgagcggggcccggtggcttctgcccagagctgcctttgatctcaaaagtaggctacccccataggtgagacccgatgtgggcgctgctgtgctaaccccatgccccaggaccactgaaacctctcttgagcctccctggaccaaactacctggttgctctcagtcccttccacagcccctcgtcctccacctgcccctgcagtgccctggggctccctccagcgctcccatctcctcactttttggtttttttttttgagatagagtctcactgtcttgcccaggcgggagtgcagtggtgggattttggctcactgcaacctccgcctcccgggttcaagcgattctcctgcctcagcctcctgagtagctgggattacaggcatgcagaaccacgcctggctaatttttgtatttttagtacagatggggtttcaccatgttggccaggctggtctcgaactactgacctcaaatgatcctccccgcctcggcctcccaaagtgctgggattataggcatgagccactgtgcctggcctccctcactcttgacactttatgggcctgccatcttcactccttgctgcccacacccagatgttcctcctggcctcagacctttgcacccggcctcgctcaagctgagggtccagacattgatcttccttcactcccaggtctcacctcccttcccttagccatgggacatcctccttctgcagacaagaaccctggggtggtcctccctatcccctgccccccgtgagcatctaaacctggttcatctaaccagactccttctcctgctgtaaagaatcttattgtatctccttaccaccccaaagtaaaattcatagatcatagaatcccagccagactttcaaaatccatctaatgtcgtagctttaaaataaggaagaaataggccaggcacagtggctcatgctgtagtcccagcactttgggaggctgaggaggatcacacgaggccaggagttcaaggctgcggtgagccacgactgcgccactgcactccagctggggtgacagagcaagaccctgtctctaaaaacaataaataaataaaataaggaagaaataaaaggaaagtaatttataatttcattatgtatattcaactggaaagaggcctgggtgtgacctacagtggactcagatgtgggttgcacagaatggcagaggctgtcactgctgcagacacagacgggagcagggttaccctcagggctcaggtgcctgctggggccaccctgtgatcttggggatgtgtttctccaaaatggcaaatgcttcttggtaaatttccaaacaaaacaaagctccatctcccctcagctttcatgctcattgcatccctagaaattgtgcatctggaaaagacgccgaacagaagtagtcattcccgatagggtcattaccgatagggtttattagcaatcctacatcagagttcctcatgccccgcgctgtggatatgttgagcagaataactgctgtgcagtggggtatgctcggcagcagccctggcctctaccctctaaatgccagcagtacccctaggtcatgacaatcagaagtggctccagacactgagaaatgtcccctgaggggcaaaattgttcccagttggcgccccatccccacctcctgcccacacagaactccctcctctcttgtgtggggtgcggggcaacttgccaccaggcgggatgcccctcacacagcaggtccctgccaccccatgactacagcaccccattactgcagccagtgaaccccctcacacttctaaactaccccaggggagaagcaaaaccactgttgtgggcctctgacctccctgattctctaatctgggtgggtgtgggggcagtgatgccaagaagctccttcccttcccagcacacactgcaagatctgcggtcctcatttctcccaggcctggctactctgtaacagctgcatccttactggccctgtggggacatgggacgtgtccctgccgtggctcccagcggccccggtgtgctgggcctttctgcctcccttaattccaccttccctgttccagctgcttggaatgtcctcagtgcttttcctctgcagttaccctggaattccaggggagtgcttgggttggtggaaccttcttagcccaggtatcctcctcctccagggagccctccggaaatgtccctcccttgataggctggggccagcactccctccccggcttctttagcccatgggaggcagcatccactcattgtgttcctccttccctgcctcctgctcccccataccatcccttaacccagccagagtcattcctctttgtagcatcccagtcctggcccagagtctggctcctaaaaggcactataaatattggtggcaaagttgaggctgtgacactcagttcaattttttttttttttttttaaagagacaaggtcttacttactctgtcacccaggctggagtgcagtggtgcagtcatagctcactgcagcctcaaacctctgggctctagcaatcttccggctcagcatcctgagtagctggggttacaggtgtgaaccaccgtgcctagctaattaaaaagaaaaaaagtttttttgtagagacagggtctcaccatgttgcccaggctggtcttgaacttctggcctcaagcaactgtcccgcctcagcctcccaaagtgttgggattacgagtgtgaacttcaattcaattcaattggcccttcaattctgtgttcattcactgaagattccaatgcccctcccccatctaaagtggggcagaccagagggaggagcagtggaggcggggtggacagggtcccagcgctggaggagacccatctgtgagccacctggaatctcatctgcctgcccaaggcttctgccccttctacaggaatgggagtcccttcaggtggacataggagtttctccatctgaaagtgcccaccagggaagaactgcgccaatcccgatgggcactggggctgagggagggcactggggatgcaaggaccctctaactccacccatagaacccttttaggggcccaggcctccaggccagctccctggcacacaccacttgtggagtatgaacttccagcccctaagcctccgggctttgagcacagcctgggcagcagctgcaggcacactggggtgcccactcactcttcatcctgcccatgcctgcccatctctagccaaggtccataccatgcacacaggtgagtgctgtggggaagagcacacagaggctgcagctggccccccgggcaggtcctcagcccactaggcccctagcccaaccctggctgagaccccagcctgccctgtgggtgcccggcttctgtgacacctccgttgcataagcggggactagaggtcaggtgaaggctgcaggggagggggctctctagtggatgaggccacctcccagctggcagggctgagtgcatggcagtgagggacgcctgggtcctgggaaggcacaggaggtagagaccccgaggccctgccagcttccccgcgcaagcctgggaagcaaagtgcccacatcttctgtttctgtcagttcctgccaagtcccagtgcctacaactgggaaatggggcaagtcaccttctccttcctctcttggtggctctggaaggaaaaagccagtggtgtcacctgaaggcagcccctttaggcaggctgggtctggggtctcagatgcctggtgctgcccggtgctgctggccacgtgtgcccccgtgccttggttggcagggttctgggcagccccgcctacaggcctttccccccgttcttcgggctcccctgtgtgatgcaggcggcctggccctggcccggaagggaggccgctcttggctgatgctcacatgcccactcctgggcctggcctggctcctgggccctctcccatgcccatgtcctcgagggccaccaggagacgggccctggttggggcagacgtcgccttggggctggtccctcctgggcttctggctgggttggtgacctccttccccactgggttctggctgggtgttcacctggggctcctggctctgtcccaggttggctttcacagcagcaaccgtgaggcctggctgggaggaggtgggtggaaagtccaaggctcctcctctaggcctccctccccggggggactagctgatcacggggggtgctcctgggcaggcactcctgggggtgaggggtggttggggggtgcatgtggtccggtagggcactggagaagaccctctgcccagagggccccaggacaccccttcccataggcccacacggctctgtggccgtgtgcgtgggagggagggagggatgagtgtcacagcgggtgtgagtgcgcctgtgggtgaggcccggagagccggcacgggggcgggggaccgtgagaaccagtctgtgggtggagacctagggcaggggtgcccttcctttctgggatgtcccaggccaaggagtttgggggcttgggggcccacagtgcaagaggaaatcctggccactaggtgtcacccggagcccatgggacagaagcaggtcccccccaccgcccccggggaggggtcggagccccttacctcccaggtatgcccactcccgcagctggggggaatccctggtctgtcacggtgtctgagggtccactcgcagtggggagctggtggcacggcgttgccctgtgcaggaggccatatgctctatggaagcaccccgtccccacctcctgcccatacagacccagactgaggacggagccagtgacaggtggggatgcagcatccctcccagcccacccagcccctctgatgcccgggtgcctgcggcaggggccccctcgtgccagcccctccaagggagcagcttggacctatgcctgccgtgcttgccggcctcaggatggaggagggaagggtcctcgttcacaaccaccccccatcccccttaggtccagctcagcaaattagggtcccaaagccctgcccagaccactgggggccttttgcagcctttcagagctggtccccaccctcctgctgtgcatccactcatccaaagcacagcaaggacctactgtgtgctgggagggccctgcccggcggagctcacgtgtgatgggatgtcagccgccaaatatagaaaccagaaaatttgtttttattcatttatttatgagacagagtcttgctctgttgcccaggctggagtgcggtggcactatctgggctcactgcaacctccgcctcctgggttcaagtgattctcctgcctcagcctcttgagtagctgggactacaggcatgtgccaccatgacctgctaatttttgtagttttagtagagacagggtttcaccatgttggtcaggctggtctcaaactctgacctcaagtgatccatctgcctcagcctcccaatacaggcatgagccaccgtgcccggctaacacttatattttttgtacagggtttcaccatactggccaggatggtctcgaactccagacctcaggtgatcgcccgccttggcctcccaaagtgctgggattacaggtgtgagccactgtgcctggcctaaaccagagaatttgtaatggagacagtgacacacaggaaaacatcatggaggaactggaagggccgtgggtgaggtggcagctttggtggggcttgggggaggggagcacccccagggagggacttgtgagaaagtgaggaagagcatcagtgaggtgagcaccccagggaaaggcattagggcagctggaacagtccgtgctaaggccccaaggcaggaacgagccaaacctgtcagtgaaacaccaggacctgtgtggactggggcggtgatgcaggtgggaggtgggaggaaacagagggtcttggaccgtgttgccttctccccaggccctcagggaccatccctgccacagtggagccttttggctggcacatgaggctgtcctagccgaggctggtcctggctggtgaggagaagatgccatggctcagggggtcaaacgggatccaaccctcacatccctgtaggctgaggagcagatacaatcccaagagaggctgggtaaggtagctctcgcctgtaatcccagcacctggggaagccagtgtgggaggatttcttgagtccagcctgggcaacgtagcacgaccctgtctcaacaggtggaaagaaaaacaagaaaacccccccaaatacttagccaggcatggtggtgtgtgcctgtagtcccagttactcaggaggctgaggtgggaggatcgcttgagcccaggagtttgaggctgcagtgagctgtgatcataccactgcacgctagtgacagagtgagaccctgcttaaaaaaaaaaatcatggaggggccctttcctcactggctgagcggtccccaaggcagggcatggctggtctgtcccagctgccaggctcctagacagggtcttcttggctggggggcaaggttggctgaggtagggcagagggaagggcggcagaggtcctgtcccagcacccctctgctgctcagctctttgcagtatctgcacaccccagagtaaaaccaaagaccttgccacagcagtgaccctacacgcagccccagaagctcgttcacctcatcaactctccctgtcacccagctggcaccaccacactactccttaagtagggacgctcctgccccagggcttttgtgctggtggcacctctgcctggaatgccctttccccaaaaccctcagagctcctcaccccttcaccccactgcaggactctgccaaatgccaccttcccaggaagctttctctgcccgttccattgaaaagcacattccccacctcagcactttctttcctttccttttcttttcttttttcctccctccctctttctttctctctctttctttctctttctttctttctttctttctttctttctttctttctttctttctttctttctttctttctttctttctttctttcctctctttcttttctttctttctttctctctccttccttccttccctccttctctttctttcttttctctgtttctctctttctgtctttctctctttctttcttttttattttttagagaaagtctcactctctcatccaggctggagtgcagtggtgccatcagagctcactgcagtctcaaactcctgggctcaagcaatcttcccgcctcagcctcctgagtagctaggatcacaggtgagcaccaccatggctgactaacatttcttaagatttttttttcttttttgtagagacagggtctcactatgttgcccaggctggactcggactcctggcctcaaaggatcctcccaccttggcctccaatagtgctgggattacaggtgtgagtcactgcgcccggccaaccaccttggtattttctatcctctttgccctgcttctcccctgaccaccatgtgaacttctagatcttttacttgtttatttttatggcccatctctcccactacccacactaggctgcaagctgaatggtctgttttgtttaccaaggcatccacaccacctagcacagtgcccgcaaacacagcaacaaatacttgaatgaatgaatgggattgaataggacaaggctcccccatccttcctgacctcatctggccacagtaggaccaggatttgggccttagcatccacccatctccagcagaggccaaggcctaagcaaggtgtcgtgtgcctcaagacggccgagccactgaccacagcacatctgctcctgcttgatggtcctgggaactgcgttttacctgcagcaaatcacattcagtcacctcaggcaaacactgcaaggcgtgaaacgtgggcaatgtgctgtgccacacatgttacatggaggcactggggacatgtaggaggatgaaggaaactgcatcgcagggaagaggtgatgccttggggagagacaggcctcaactgtcctgcctcccctgggggaggtgtcagtggactactgagtgaagatgtcctgctatcagggtcccctcgtgccaagtttctagtggcaaggcagggcctcccctgggagcctctcacatacctgccccttcactagagggcatgaaatctactccagcccaaggctgcgcagctctgagatggaccctgtctctctgaattgcctcttctgattctcaagaggtatttaaagcggatctctacttgctttttacttatttttgagaaaagttctcactctgtcacccaggctagagggcagtggcatgatcacagctggctgcagcctcgaactcctgggctcaagctatcctcctgcctcagcctcccaaagtgctgggattacaggtgtaagccaccaggaccagcctcctcttgcttttggcttatccagtttccctaaattaattttgtgtgccttttaggagaagatggggtcagtaatgcattagagcccaattaatcattctaaaaaaagatctgattgagacatacttataaagcgactcctagagctgaaaggtcaaaatctagcctagatattgaaaaacatttttagagaaatgtattcgaaaagctcaatgctctttttaaggtgagaggtggggagcctcaaattttgggagcccttgaagggacctgaaggaaccccagggatttcttggagcataatttgaaaaccacagattaaactcaagatatcctcattgcagggaggaaccacattctgaggcctatttttatgacaatggctagtagagccagtctgcagtacctgatgtccccagtaggggtcacttctaggaggaagcctctgccaggccctggtgtaatcaaggagggctccaggcccaagtgggcccatgtgcctgtgtctgtgcctcagtgccagtgacttcaagcttgagtctgctctgagccaggcgccactacatgcccccccagtggacagagctgccctctggccacgccgccagctggctagggctgatcagaagccttcagtttcaggacagctgccagggtgtggaccatggggactggtaagagtttctggctaagtcctggccaagccattccaagggacagctgcagtgtctctccagtcagcacctggaagggggccagcccagcctcagacctggggccaaacacatgtgagtatgtgcaaacgtgcacacacgtgtccacaggcacacacaaatacacatgtgcatgaacacatgttcacacatgtactccatgcacaaaggaacacacacacaaataacatgcacatgcaagcacatgcactaacaagcgcatgaatgcacacacgtgcaaatgcacagggatgtgtgcacaaatcacatatgtgcacacactcacacagacaaacactccccactctgcctccccaggcaggctccaggaatggagaaacgcctttgcatccaatgtgtttggggtgagatcagctgggggaggggcctcttccctgcctccccagtcctggcagctcctcccttctgggccaggcttctcccctgtctggactggttggcatatgtgtatgggaggaggaaggggcagcaggaatgtcctaccacccccaggagctgctctgggcagaggcaggggatggcgcctttgctggactccctggctgcatctttctgggtggggggcactgggatggttcctgtatcccatagaagcaaactgggcagagggccgaggtgggtgctgtggtcactgtcaggcattgaagggacccggggtcatccctgaagcaggtcagcctgggagaggccttccaggcttgctgcagtcggcacccccccccacaggaagccagcccagccatagcctcctgcccttttgaagatgctccctcctggcttctgtccctgctggcaggctggggtttctgaacccctcattcctcagtcatctcgaccctgtgagagcctcagaggcctcctgatccctgttgtcccctggccatcctggagtgtcagcccggggctggccctgagctcattttcagcatgacaactggtcctcagctgacacccccatcccctcagcccaggaggccagctgtggtgggttctgctgaatccagcttgctaaccaccagcccatgcccacagtccctggcaggggacacagttctgccccctcccccaccagatcaatacctccaagactgctgtcagcaaatctttgacctctgacctggccacacacagtgacccctgaacctgttggtctttccaccaacccttgctctagtctctggggtgggtgaggggctgacaccctggctctggcctgggctgttaggggcagggagagggtgaggccatcagtccccaccagcccggcctcttcccttcactccacactcagggccacagtggttggtgttgttgggggggggatggatgcagtgggggatgtgccacctatgccaagcaggctgtgatgaaggattcggggattccttctggagcccaggggccctgggagctccagccatgagtgaagagccagcagcgaagaggatggcttcccatcctctctccaaggcccacaaaggtgcccacccctttctgctctgggccctccggatcgatctgggacccagcagccttgcagccctgacctgagaatgcaaaggggcctgtacagattgcttcctgagccctgttccttgcagctcagctgggagggtccctgtcctgcccacccatcctgccccagataagggtctagcccactgtctcgcagaaaccgtggtggaccccagtggtgctgttgggagccccacatcccgaaccaccctgggatacagcctcgggagtcctgcgctccctggcagacaccactgaccagggaccctgccttcaggaaatccggccaggacaacaggacctgcccctctggtgtccaggtcagctcaccatgtggccctttcctggcccgccttcccttgctcctgctcctaggaagagatgcctccacctccactcccccatggggcattctgaaggccatgggttccagcagtcctgtgctggcaccaactgggtctgcggtaggacaaggggcagtggctcagagactccagcagtgagacacttccctgtcccaggaggaggggaagaagaggagcaggaggaggaaggagagggagaggagggaggatggtcagggccccccactaaaatgggacaggcaggtgaggggtgcttggagtggagactatgctggaaactgaggctgagagaaggtagtcagaggcagagccacgcatgtgtgctccagtgcgcctgactccagggtcctcgcttctcctgactgcatcagactcgaccttgacctctgggtatgctgggtcagggcagagtgctgacgcactgcagagcccctcgggccccgcctctctgcttacgggggccttctcaggagccaggagggaccaacccaggtaggggactgtttggacgagtccaggccaggtggaggtgtgggcagccggccctgaggtcactgggtgtgtgtcaggggtggggattgtccaggaggcccctacagagcaacacgtcattctaaggctacatttcacactggcctcgggtatgaccttggccgtcccttctcccctaagcagtcctctgggctttctgggagccttggtttcttctccacttgagacctgggccagtcaggtgggaaaagccagcagccacggggggcctggtgcagaggaggaggtgggagaagcagcaggcggggggcgcccaaggagcctctctgcctaccttgggctcagccttgcacttgatgaccccacccgggcctgtgtgacaaccatgccactgacggggaactgagcctcggagaggggaggtgactcacagaggtgacccaggagatggaaccgcattgggagctggggctggacattccagccgctgccaggaaaatcctgccggaagagtgcactgtgcgggtgcccaggaggctgcgggtctgcacccagctcctccgacccggtgcccaggacccctgcctggctggccagagaggggaagtgcgccccgggcggccagcccgcagctgttgggcaacatctggagggaaggaggaggtgaggagcagagggcgtggagctgggtcctgacgtgtgcccgcgctgcccggcacccacgagggctggggcccggtgccacccgggggtctcagcctccttctagtcccacgagccctagaggacttcctagtccccctcgctgtgccctggggggtctgggctctgtcctagggggtctgggctgtgcacaacacaccacacccccgccccagatgggggctcctgaagacccatgctccaacacacaggcacacacagacacgcacagatacacacagatacacaccacacacagacacacagatacacacctcacacacacatcacacacacacacagatacacaccacatgcacacaccacacacagacacacagatacacacctcacacacacaccacacacacacatagatacacaccacacgcacacaccacacacagacacacagatacacacctcacacacacatctcacacacacacagatacacaccacatgcacacaccacacacagacacacagatacacacctcacacatacaccacacacacacacatagatacacaccacacgcacacaccacacacagagacacagatacacacctcacacatatatcacacagacacacagatgcacaacacacacaccaaacaccacacaaaccacacaaatacacaccacacacacaccagacatagacacacagatatgtacctcacacacatatcacacagacacacagatacataacacacaccacacacacacagatacacaccacatacataccacacacagacacacaacacacacagacatagacacacacagacatagacacacacaccacacacacagaggcacacacagacatgcatagacagatacacatagacacacatgcatacatcacacaccacacacacagatacacagatacacaccacatacataccatacacagacacagacacacatgcatacatcacacaccacacacacagatacacagatacacaccacatacataccatacacagacgcagacacacacaccacacacacagacacagatacacacaccacacataccacacacagaggcacacacagacagatgtagacagatacacatagacatagacacacacagacacacagatacacatcagacacacacacagcatacagacaccaaacacacaaacacaccacacatacacacaacacacacatataaacacacactacactcatagacacacacctcacacagacaccacacagacacagatagacacaggccacacacagagactgatacacaccacacacccacaccccacacacagacaccacactcacaccacacacacagatacagacacacacaccacactcacagacagagataaacacacacaccacactcaatagacacaccaagcaaacacacaccacacacacagacacacacaggcagacacacacgccaccctgaccctgtccacctatactcacggaccatgcctcctcgttggctgcacaaacccacatagactcgcagtcagccaccctgcaagggtcctcagccatgcgtcccctcccccacccctcagccccgtcagcccccgctggccaaggctggagctccaggcaggcttcctgggctgggtgcccctccctttgccctaggagatgtgcagggcaaacgagcacttccaggggattcccggggggcagggctgcggtggcttcatggacggggagctggatgccggccccctgaagcctccagcatggggcttgtcacctccttggggctgccctgaggaacctcctgccccctctagagccaagtccccctctgcaccctctggggtctgggtgggcacgaagggggccctcgtctttgactctccatattcccctcacgctggcctagggtggcctgcgggccccacctcactgatgtcctggattggaatgagggagttcagatgaaggggcccccacaccgtgtggggcctggcccatcggggctgccctggcctgggccaagacccaccatctgctccaggccatggagacgccttccccaggctcttcgtccaggccagacccagttctctgactctgagctggtcagggcagaagccccatcttggccatcagggcgccggggacctctgacctgctgcctccgtgtgacattccaccactccagccggattcttcctctgcaaagtgcccaaggcgccatgaagacgtgaagatatgaatactcctgggctacttgtgatgggattggagggggtggggcacggtcctggaaggagccgcttctccctagtccggtggggctcttccctgaggctgcagagattaggcagtggggttctgaagccccagtgctgtcctccctcccgggaggtggcccagaacggcaggaacaggcttgcaaatgcgcaggtgctgggctccatctcctgaggcatttttagggtggatgccctgccctcctgggcagagcagggcagtcgctgcctaggggcgtccctgctcaccaaggtcaccactgtcattcaccatcactcttttttaattattattattattttagacagagtctcgctctgtcacccaggctggagtgcagtggcacgatctcggctcactgcaacctcccctcccaggttcaagcaattctcctgcctcagcctcctgagtagcttgggactacaggcgcctgccaccatgcccagctaagttttgtattttagtagagacggagtttcgccatgttggccaggctggtcttgaactcctgacctcaggtgatctacctacctcggcctcccaaagtgctgggattacaggcgtgagccaccgcacctggccaactctttgttaattattattattactttttagagatgggagtctcactctgtcacagcctggagagcagtggtgccaccacagctcactgcagactcaaactcctgggctcaagtgcctccccagtagctggggttacaggcacgtgccaccatgtccccagctaattttttattttttgtagagatggggtcttgctatgttgcccaggttggtctcgaactcctggcctccagtgatcctcccacctcggcctcccaaggcagtgggattacaggcatgagccaccacacctggcctagtggccagcactcctgactgggcatcactgcccattcagactcacaactgccagtgccaatcattgcctactgggctttactggcagaagaaggttggcattggcagtggtagtggccactaggtctttagagtaatgacctggataaagacagcaaaggcgcccagattcctgagaggcttcccctgcccagcacagggtctaggggaggatgcagccttggcaggtattgagggtgagggcacagtgcccatagttggttccttttgaaccctggccctccttctggtcagctgcaggccacagtccccaacccttggctctgatccttctagaggacagtgggctgggctgtctgggcaggagtcacactcatggccaggatgggttgaaaatgggaagtggcccccagtgcctggtgggtgccagccattcttcttggctgtgggggcggctgcctctgggaagggccttagtcacccagcagcggcttccgggaacccggtgcccagtctctgggaaacatcacaggtttttccagcgggacccccccaccctgccctggggtggaccccaaggaccacggtgcagacacctgctgggaacgggccaggctggctctccagggtccctgctgcccccaggctgactgccaagctacccaccgcctctgcctacccttcgtgtggggcacagagctttgacctgcacttgcctggctccagagcccttcttggctcccaagaacccaggataaggcctgacactcggggtttttgccacctccatgctgccgacttctgtcaccacccccctccgttcctggcccctgcctcagccaagcggtcctggatattcctccctctgtcctacccccgagacatcaacagagtcagccccacccacccctccctagcctgcaggtcccatggctgtcctgtctctctagggtgccccaaacatctgggtgaggggcggccatcccaccagcgcatagcacactccctggaagactggaagattgtagatctcctgtctagtcctgttcatccactgagaactgggggctcactgaagcccaggctggcaggagtccctccccgcagctctgaagcccgccatccctcttcaggcactccctggccgctgcgcctccctgtggggtgggtagggggctggccctggaggccgatgacctgactttgattcccagctcgtctggtcccagcagccctgagagcccgcctgtgtccccctttcattgtctgcacctaatggggatcgtgtttgtgcacacaccatacagcagtgacatcggttcgtatgcaaggggcctggaacagtgttgggtagatagcaggtgctccgtctgtgctagctactgtcatggctactattgcagtctagcccaatgctatctttgtgttctcactcctccctggccagcagcggtggctgggagaggggtccaggagagccagcttccccatgtgggaagaggaatcaggccggggctgggcaccctccgtgagaggcacttctagccaagggtgccatgcagcctgtggccctgtcccctctccccacgcggccttctcacctggatacatctacagccagaagcacgtgtgtctgactccagagccccactctcccttgcacaaggtctccacctctgttccctgacctcggcccccacgagaaccctgcagacccccactgtggaggatctgcgcagcgagcctggtaaagggagactcaggagcccaagctcccacaggcagcggggtgggggccgtggggagcagcaggagccgttggtgtgagggagtggccaggccccaaaacagttagtctgtgctggtagagagaggctgggctcagggttgggccgagccaaattctgcaggtcacgtgcagctcagcccagccccttcttctgcagtcgcaatgctgaagacagggcaccaaggctcagcccagtcagtacccacagtccttggtgtgaggacaaggccagaccagggcctggagtcctccccattcctagcttggggctgtggctcccagctccccagcacaggggactccttctctaaccccataaggggatgtagatagcagcccctttatgctgactgctcacacctccccagacaccgcaggatgcagccaccacgccaaacaggtgttgagtgctccatttcacagatggggaaactgaggccctaagagggaaagggcagaggcatgggggccaggctctgggtttccatccctgtcattgcccccagactctgctgaatgtccccaccctcaaacacagcttgctgggctggagaagaccttgactgcccgaggtcgcaggtctgtccactgcagccccagccctcagccctgctggggcaactgctagaagccagcacgtcctgaaagcgtgagttcgttattccagctcatcttcccaggacctctgcaaggcaagcctgtgttgcagaagaggaaggcaaggcccagggagaagaggtgacctgcccagggtccatggccaggaacgagtggtattgagacttgaacttgggtctatctgagcccaggatcaaagtgtgaggagagtgaggcccagccatccaaggtctggtgcagggagaagcgggaaaatgaggccagggagctctgtggggaggggtcaccagagtggggcagggcttggcatcaggggcaccggaggctggcgttagctctggtatctattgcagctttttttggttacagggtctcactttgtcacccaggctggagtgcagtgctacaatcacagttcactgcagcctcaacctcctgggctcaaacgagcctcctgcctcagcctcccaagtagctgggactacaggtgtgcaccctatatccagctaccatttcattttactttttttttttagagacagtgtcttgctgtgttgcctaggctggttttgaactcctggcctcaagtgattctcccaccctggcctcccaaagcactgcaattataagcatgagcctctacatctggccagtttagcttttaataaaggccacaagagacataaatcagcgtgatgagtgagtgagtgactgtaagggtgaagactgtaggtaaggaggtcaggaaaaggatccctggtgggggtggggtggggtgatacttcagcgaagatgtaaaggacaagaaggagctgaccaagagtctagaaggggaagagtgtaccaggcagagggagccaccagtgccaaggccctgtggcgggaatgggtttggtgtatttcaggaacagacagggaccagatgatgtggttctcagatgcagccacccccaccatgcagatgacctgaattttgccccggatctgagtggggttgggttctgtctagctccggtcaacggaggatgccctggatcttgaagtgtgtggagggttcctgctgccacggaccaatagatggaggcctgtgacttttcctgggaggacgggccgggggaatacaggcactgatggcagcttgacacgaccgtagcagatggctcactcattccccgctgtgccccaggccgacccacagggccttctgaccctctgtgtgaggcatggagggtggtcctggggcagtgggaggcacgccagctctcaggacccattgcagcctgccctgactggatgcagccaagcctgttaacagcctctgaggactgagaaatccaccctttctggcactctccccagggaaagtgagccatgggaggcttgggtggaaagcactgacgagtttccactgagccaggggtgggtgtttcagaggggaagggaatatagaggcccagaggaaaacaatctgagctggcatagaggagagaagttgcagtgggtgaggaggccggggaagccctggaaagaagccctgagggcaggcgacggcccaggcagagatgcagggacagcgtggctgtgtcaagccagagcgggtccaaggctaaaggggtccctcgcagcctctgacacactctcaccaccttgccgggagcagacacagggctggctggctgggactctcttgctactttatctcattcttctcaggaacgtagctcagagtctgaccttggccttcagcactttcctatctgaagtgtccatccaaagcgaagccatcctccaaaagcccagatgaacacaccttgacatctgtctcaccacccatgactttttgtaaagaccccagtcttctcactgcacactctgcttcaagcacatgtctttgtatcccaattctttttttttttttttaaacatgtttttgtagaggcagggtctccctatgttgcccaggttggtctcgaactcctgacctcaagttatcctcccatctcagctttccaacttgctgggattataggcatgagccaccttgcccagcctcaattctttatttctgtataaactgtgtagtttaggtacagatagtattctttttggttttttccaaaagaaagcatctgcaagcatcgcaaaggattctttttttttttttttttttttttgagacgaagtctcgctctgtcgcccaggctggagtgcaacggtgtgatcttggctcactgcaacctccatcccccaggttcaagagattctcctgcctcagcctccccagtaactgggattacaggcgtctaccaccacgcccagctaatttttgtatttttagtagagacaaggtttcaccatgttggtcaggctggtctggaactcctgacctcaggtgatccacctgccttggcctttcaaagtgctgggattataggcgtgagccacagtgcctggctacataggattcttggtggaaatttttcctttgcacctagaaggtgttacccactagtcttctgaccagttgctgagctgacatgtctattgtgaggcaaattcctttgtagtatgcattcctttgtagtatgcatttcctcctggtactttcaaggtagtatttttgtctttaatgctttttaaaaattacttatttatttatttgtttgcttatttatgtattgacaaggtcttgctctgtcacccaggctggagtgcagtggcacaatcatagctcactgcagcctccacctcctgggctcaagagatcctcccacctcagcctccaaagtagctgggacaacaggtgtgcgccaccacgcctggctaattgtcagtggtctttagttttactgtggtgtgtttgttcttaatttatccttcttaggactcagtgtgcatcttcaatgtgaggacttcattccctagttctggaaatttctcaactattaattaggttttgaggttttccagttttcaccttctgcaattcctattatatgtgtgttagcccttcttggcccttctcattcatatctccaagaatcttagactctcatatattccttgttttcatatctgtgtgctgcatgtcatgaaatttcctcagatatgctttatatttttcttattcccctttgagctgcaactaatttgctatattcgctgagcttctatattatactgcaatgagtattttttgaaggactctttgatttcttttgaaatctacttgttattttaaaataatatttttattatgtcttccactctcttttctatcttaattattttaagtatacttattattatgtaagtatacttattatgtaagtatacttattattatgtagtcttttacaaattgttctaatatctctagatctaagatctcccactgacatagttgcttgcttttttgcgtcattcatgattactttttattgtgagctcatcttcatcggggttaattttcctgtggatctgtgtctgggctgtgaaagtgtccatgcaaagtagcttggaagtaagtttctttcatggctgtatatacatttttctttttttttgagatggagtctcgctctgtcccccagggtggagtgcagtggtgccatctctgctcactgcaacctccacctcccgtgttcaagcgattcttctgcctcagcctcccaagtagctgggaccacaggtgtgtgccaccacgcacggctaatttttgtatttttagtagagacagggtttcaccacgttgaccaggctggccttgaactcctgacctcatgatctgcctaccacggcctcctaaagtgctgggattatgggtgtgagctactacacccagccatggctgtatatacatttttatgttaatttctggatttggagttttagaactattggactgtgtacatttgaatccacacttaactttttcctgccattgcctcaggaggatagaaagcttcactagcacttcttttttttaattttttattatttttttttgagattgagtgttgctctgttgtccaggctggagtgcagtgatgtgatcttggctcatggcaacctccacctcccaagctcaagcaagatccttccacctctgtctcctgagtagctgggactacaggtatgtgccaccactcccagctaatttttgtattttttgtagagatggggttttgccatgttgcccaggctggtcttgaactcctgacctcaaatgatccacctgcctcagcctcccagagtgctgggattacaggcatgagccactacgttggccttgctactacttttttcggatcagctttacacatcccttttgtacagagcagcccttccagccctgcagtttattgaagggggtcggttccagctcgccacctcggggagtccaggactcatatcctggccctgtgttctgccctgattctgaagtttttcccgttctttctagcctaagcccccaaccctgggccttgtggctccaaggtgcctcacttacgttccatgatacagctcctggatctgctcttgaataaaacctcccagtttcaccatctcccttccggtcacaagggtgctctttccggctccaggctctgcaaggcagttgtgctcagagccccagagcaggccctacagcacagatcctgcagacgggcacagcctccacctcccaagaactccaggctctgactcattagtcaacttagtccatagctttctagcaaaaaaaaaaattgtgacgcaggccaactgagacctagaactttttagtcatggaagccagggtcttttggtgcacctggatcactgattcttgacctaggatagtcttgtactctcaggagacatttgacatgtctgcagacatttcttttaagagaaggggtctcactatgtcacccacgctggagtgcagtggtatgatcctagctcactgcagcctgaacctcctgggcttaagcgatcctcctgcctcagcctcttgagtagctggaactccaggtgtgccccgccatacctggctaatacttatattttttgaagagagaggggtcttgctatgttgcccaggctggtctcgaactcctgggctcaagagatcctcccgtctctgcctcccaaagtgctaagattacaagcatgaaccaccgtgccctggagacatttttgatcattgcaattggtggtggtgatgggaaaattgttcctggtgtctagtggatataggccagagatgcagctaaatatcttataatgcacggaatggccctaacaacacagaagtatccaaccccaaacacccacagtgagtcctgaatcccgagggggtgagccctctgtccgctctgggtagagggatagagaagctggctaaggccctatcccagggtattccctgtggggaagcttggagctgaggctgggactggaggaaggatgtctttcatcagatctggaggacgccagatatcctgactgctcccggctggcacagggagcctcatctgagcccacgagccagggtgcatcccacatcccacccgatctgcccacgaggcctcccacccggcccctccctggtgcagccctgcacacacgcgccagccacacgcacgcctgtgtgatgtggtgagcaggccccgtatgatgtggggaacgggcgtgtggtcgttggagcaggccaggccctcctgggggcggtgaggacatatctctggtgccatctttcctgttctgataaataactgatctgtggttgaggcaagaaggtcacctctgcccagggaagctcaggaacaaaccacttgtgaccggtgggaagagcccgggggggcagcgggaagtctgtcttccctggccaccgggctgctgggggcagatttcagaaaagggaagtgctgagctggggcagtgcttcctgtggtcgcggcaggcagggcatcagggcgggcacggcaaatcagaggggtgactgccctagcttggaggggcaaggagctggggtccctggctgggccccatgtgctgccagccttcatgcattgggctgaaggcctgggggggatggaggaacatactagaacaccaacagcactgaagctcccctgcttgggagtgcccctgggctcctctctgcactcagagtgaagtccccctgggcttcgtgatttgctcctcagcctctgcttctctggcacctgctcgtcaagttccctctgcatagggcccccttctcccaccagctctgagcactggggtcggtggagggggcaccccctgccccttcccctctgctaagcccggagcccctggcttggctgctctgggaaccctcttcatccccaaaggaaggcctgagcccaggagcctgtgagatccttcccaggccctggcgcccctctggtgggcagctgtctgtacccctcttctatacttaggggggatctggtgcaggggcttaggagcaagggaggtggccgggcctctgtagttcctggagctcccatttcctcttccactaaactctcagcatcaccacatgacccagactgtgaacccaggggagtgctcggttggggaggggagtggagggaaaccggctccctcctgtcccagccctgagcaccagcactgcggttccagctccctgcaggcacttcctgcctgctctgggaaagcacagatggctgccacgccatcacagccctggggttgagcccagacccccgaaccttgactgtccagccctgccagaccccgtcaggatccacatagacccgatgggttgctctgtctccttggctctggccgagtccatggacaaggagcatggctccatccgccccgctcagctctgtgcagcccacagccctgcctgccccacctgagggttggggctctctggactggtcaggggtgtgtgctgtccctgccaccctgccccagctgaggcctgtacctggcaggggtcgagccagtaaaatcattgtcctgccctaacccatggtgtctaggcagtatgggcagggccagggagggcccatccagcctcgcaccccaccactcaccgtcttgctctctccttttcactccctctgtctcctgaccttgggtcacctcttccctttcttgctctcactcagtcccttctctctgtttttctgtttcttattttgagacaaaatctcactctgttgcccaggctggagtgcagtggcacgatcttggctcactgcaacctccacctcttgggctcaagcgattctcctgcctcagcctcccgagtagctgggattacaggtgtgcgccaccacgcctggctaattttgtatttttagtagagatggggttttgccatgttgaccaggctggtcttgaactcctgacctcaagtaatctgcctgcctcagcctcccaaagtgctgggattacaggcatgagccactgtgcctggcctgtttttctgtttctctatcactttagtaagtccttctagcccccaggaccccccagcccctctctgtatctgcacacatttgtcagtctgtccctccaccactgtccttgtttcctctctcttcctcgtcaccctgccctgacctggggggtttgtgtctctctgtctctctccgcctgtctccatctcccccttatcctcactctctctctgtctgtctctcattttcattctctttcctttcctctttctttttattttatttgtatgggtccatagcaggtgcatatatctacggggtacatgacatactttaatacaggcatgcaatgtgtcatgatccatcagggttaatggggtctccgtccctcaagcatttatcttttctctgtgttacaaacattctcatcatgctcttttaattatttttaaatgtacagtaaattcttggtgactgtcatcaccctgttgtgctattaaatactgaatcttttttttaaaaaaattattttaagttctgggatacatgtgcaggacgtgcagatttgttacataggtcaacgcgtgccatggtggtttgctgcacagatcaacccatcacctgggtattaaggcctgcatgcatcaatcctggatcttagtcattctacctaaccatatttttgcacccgtcgaccattcccgctgccctcccctccctctctttctccccctctctcattctctccccattttcattttctctctctcttctcattctctttcttcctctctctgtctctgcctctgcaatcacccctggtcttcgccctccctgtctctgctccccggagtccctgcacgtggcttgacagtggccttggtaggacccactggggtgtttcttcgtcgcccatgggccctcatgctgttatcagttggaaatgaatcagagattaggaagcggggggagtggtgggggtgttatcgcccagtgcacacggggctctcagctaatctctggcggccctgggttcgagaggaaatgcagttgcaacactgagtccttcttaccgtcactgtcatgtccgcggcgaggctgtgggggacacgggcaagagattggagaggggagagggagaggagagagggcctggcctgagctcctggcaggcgtttgtacaggctcacgtgcacacgtgtgcacacacagcatgtacacctcctggcccttgacacctgagccgtcgccaggccttgcctgtcacccttccattgcctctgcatgcccgcacctgtccacgtcttcccctgccgccccacgtccccagccaccatctctcttcatgggatggcagctctggcctcatccaggctcttagccaacagagtggccatattattattattattttattttattttatttttttgagatggagtcttgctctgtcgcccaggctggagtgcagtggtgcagtgtcagctcactgcaagctccgcctcccaggttcacgccattctcctgcctcagcctcccgagtagctgggactacaggtgcccgccaccacccccggctaattttttgtatttttagtggagatggggtttcactgtgttagccgggatggtctcgatctcctgacctcgtgatctgcccgccttggcctcccaaagtgctgggattacaggcgtgagccaccgtgcccggcccagaatggtcgtattattaaatgaccacatgatcgggctgctttccgaacttcaccttcccacggttctaggaagcagccaccattatcatggtggcctccaggcttgcgtgtctagctcctgtccttcctgccctcacctcccacaccccttggcttcctagcacctgcagttctgcctcgacccctcctcagtgccccggcttttgcaaatgctctcccctctgcctggaaaactctcctccccatgacaactcccatgcctcctatggcactcggctttcctgtccttcatgaaagcatccagggtccccgagtgccaagctgcagcaggtcccttgtctcggggcttccaccctcgaggcgtgagctccccctgtcaccatcctgcctagggattatgggtgtaattcctacttcctgctcacctcctgccagactgtgggcctgatggggcagggaccgagccctccagtctgtctagggcctggccgcaccaggcagtgattgaatgaacagatccataaacacaccgagagacacggatgtacccaggcccatgcacagacacacaaatgcagtcaccagccatgcacggaaactcacattgacagacgctcaacctcacaaacgtgcaaaccaaagttacctagagacgcacgcagtgaccaagacacacacacgcccactgtcttctgtctatgctctgggctcactgcctctcatccagccctgcccctcgggcaggatcccctgcgggtgtgggcctcctgcactgcagccctggccttagctccagggggccaatcccatgttatgggcccccagcaggattctctgggccccagccgtggtcttgccacgtgactacttacaagtggcttttatgctaaatgcacataatagcacattggcataatatcattgccaatactcacaggtaccatggttcacacagggagcatggtgtgaagctcctcttacagggcttgttagaggaaagttccagctcaggcaaaggcttggggtggagcggacaaagctacagtttggccttttcctcagcagcgtcctgcttctagaatcaccactaaagttaacccaggcgaggggttctctcccagcctccaggaggctccagctggaggcaaaccgccggtctgggagaggtacagtggccagggagaggaagggtttcagggtggtgtgggtggtaggggctgaaggcaggggcagcagggcagggcctggaggccagcagcacagagggtccccacctggcttcattttgggggagggggctgggcagggtatctggcggaggaagcaagaaggggtggcctcagagactggcttgcggagatggggctgcattccctgtggaagggagtgggccttcacggcttcaaggccgtttgtcacctaaagcagctacgggcatcttctctcttccctctttctttttagagacagtgtctcactctgtctcccaggctggagtgctggggtgcgatcatagctcaccgcagctgcaaactgccgggctcaagtgatcctcccacctcagcctcctgagtagctgagactacaggtgggcaccaccatgcccagccaatttctgtattttttgtagagatggctgtgttgcccaggctagtctcaaagtcctggccttaagcaattctcctgcctcagcctcttaaagcactggtattagaagagtgagccatggcgccctgcctctcttaaagatggctttaaccatcacttacagcacagctgcatccctccttggcggggtgggggagattctttcccacctctctgagtgtccccatctgggtccttgctcagtgagagccagactttctgctataaccaggccctgaatgagagagaaccagagtcatgtgctgtgcaccaaatgcagtgggaagacacgagggatgcctcggtgaccttcttttcaaacaggagtctttccctggtaacctgcctctgaccttccatcagccagatgttatcttcccaaggcaacagtgttccagaattctttctgaggtggccctggcagcttctgggtccttctattctgatttccagttttctttttccatttatttatttatttatttatttatttatttatttattaattatagggtcttgctttgttgcccaggctggagtgcagtggcacgaacacagctcactgcagcctcaaactcctgggctccagtgatcctcccgccccagcctcctgtgtagctgggactacgggcatgcaccaccatgcctggctaactttttatagagatggggtctcactatgttgcccaagctggtctcaaactagcagactcagtgattctcctgcctcagctttctgagtagctgggaccacaggtgagcaccattatgcctggctaattttttatagagatagggtctcactatgttgcccaagctggcctcagactagtgggatcaagtgatcctcccacctcagcctcctgagtagctggaattacaggcatgtgtcaccatactgggctagtatttgtattttttgtagagacagggtcttgctatgttgcccacgttgtgcttgaactcctgggctcaagcgatcctcccaccttggcctcccaaagtgttgggattacaggcgtgagccactgcacccggctccaggtgcagtggagccggcccaggcctcaccctttctccagacctcacattcccaggctcgttgaagggagcagggtgcttcaggcaaacttggggctcgggtctccaggcacttggggttttctcctcccccggcgctggcagctggcctggcttctctcggctggagatgctgaagactcctcggctggtctgagaagcatgagaacagagctgggaaaactggccgtttttgtggtttgggggtttgatgcaagtttcacaactgatctcccaagaacacggtcggtccggtcagatgcgctccctggccaggggcctgcttccctgctgacgccggtgctgaccgcccgaggcgggggctccactcgccctccccaccccattccccgctttccttctttagggaacagcctggaggtgtggagaagatggctttgttttgggggctttcgtggtttccacctcatccttcagcctggggagagctgacggcctggtacccctcactctcatcctggagtttttctcagacacctctgggcagctgttcttaaagctttcattttgaggggacagtgggccaaggacgtcttttgtagtgataatcttgggccggggctgatgagtgggaagtcttagaaagacctgctctagggctccgggagagatgagggccgccagggaggcacacacctccgtagccagcccactccaggaacccagagctgcctccccggcagacagctgggctggggagggggtcctcaagacctggccctgcctccaagtagcctggcccccggacctatccttccaccctgggaagtcccgagctgcctcaggccagctggggcagaactgaaattggtgacatgtgcctctctggtcccttgactcccgcccccgctccctcacccccagagtcttcctgaaggagcctccagacccagcgaggagccacaggcaatgcccaccctgagtgggagctgctgtcctgccttccacgtggccccagcctagctcgcccttgcgtgaactgggagctgccccacttccggaggttggtgcgtggttctagatcctgtcgtccctccgcttgggggcacaacgggctgggacccatgcacgtttctcagacactccatctctcatctcacagagcaggaggggtctgcaaagggcaggctggtcaggacacagtgtgaggcagggggccccggggaacagagtccaggctccacctctgctgagcaggcagtcctgagtgttgttaccaagtttgggtgagggcctgggaccctgtcacatcacagctggggaaacggccagggctgggactcagtggcgaacagcagaacccaacaggcggccgcacagactcacgaccagggggctcggtcagaggtggggacagagggtgacctggacttgctgagtcaaggagtcaggccagcgctgcggagaatcccacagggctacgcttgggggccaaggagaggcacgtggccaggcacatctgggtggacagaggggttccagccactcacagagccctctcagtcagagccagataagcctgggcaactgagccactcaggcagggagcgggcgggcatctgaggtccccagggagtctgccctcctggtgggcacagctgggcccagatgaggcccacagcattgggactgggcagagacacccagacatggctgctgctgtgggccccaggaaggccccatatttggggtgcatctgccgggtgcctgcgtccccttcccgttccctatccctgtgcccccctcccagcttcctgtttctgttttggggctgcaggaacttcctcttctcatcacggaccaaaatggcttcttggtctcagctgaaggcctggcggggggctggtcaccccagcctgaaggacagccacagagcgaggggggctccgagcctctgggggcggtgacatctgccaaagggtgaactgtggccctttcccaagagactcccacagctcctccgatggagcctgtcatgtgagcacctgcccaggccacggagggcctgggtcctgctggagtgaccctaaacggcccccttgtgcccttcccgcctcacgcaagggacccaaaatatggattgcctggtctccccttcctcctgctccctcccaggcacatggtgcagacacttacgggcaccgtgttggcctatgtgtgtggatgagcaaatacacacacacggggtaggggggtgccctgagcctgtgaccccctgagccggtgacccctgcctgccagggagcagagctgcagattcctggatgccgagggaatagaaggcctggcccggcctgggcagtacatggtgagggtgtgtgtgtgtgtgtgtgtgtgtgtgtgtgtgtctgggtgagtgtgcctctacgcatgtctagggggcaccatccttttcctcccactccccctgcccccttcccctgagcagagctgctcccttaaataaagctgagctgtgccctttggagcccctgggccctcgagggagtgcagggtgacagagtgggctccccttactcctgggactcctcactcagggggagcctgtggtgggtgttgggggagggcgtaggaggtgggcacacgccagggagggcacacaggatggtggcccctgatcccctggagttgtgatgcccacaggaggggtgctttaccaggcttgggcaccccaggaacatcctggccttgggatggggtgtgggggtaaatgggggacggtgctgagaggccgagccccggtctacctccctgcccatccaggggtcccgggatggagttgaggagccagatgcatcctctggggggttgtggcctgggtcaaggtcaggacagcgccagggaaactcctgctaccagctgcccctagccccaggctgccgctgctgtccagaattcacccagcgttcactccatgccaggcaccaacacggacagctcctttaatgcccgatgtccatccttgtcacggacaggtgagtaccctgtggccaaatgggcaggaggttgtggagcctggcacccacactgcagagatgccgaactctggccagcggcctccctccccaaggcccgctccatggggagacagtgaggggaacccacaaagcctggggtcactgggtccccctagctggcacctagcttgtgcccccattagcacagagaggaggcggtaaaacaaacactcccgactgtttaccccaacatctcggggccataattaagcttccttcaatcgggcccttatcagcccggtatcttgagcagcctctgacggggaaacatcccggagcatctaacgaaggaaagttggacgccttttgagactttttaaatcctgaagaataggcctctgttgccagctacccgcctgtggcagcctgcctcatctctggactctgccggctgccccaggggcaggggcaggaccaggcggccccagccctggcaccccagccctgctgggatgagcccccaggccctgcccaccatctggctcctccaattgcagtgtccctgctggccagcggtggggtcctgaaggcaccccctcttctgccctcaatgccccacctcaccctgccagatgccaatatctgccttcggcaggcacccttgccagcctgggccaaacccaggtggtgggtggggctggtgatgaagggtgagctctcattgcccacagccccccatcacctggttctacaagttccccaccaaccaggtccagacctgccactctcagcctctgagctttgctgaagctgttctctccacttgcaaggcttgtccctgctccttcctcctggataatttctgcttatattttaagacttagcttccagatgtggcggttcatgcctgtaatcccagaattttgggaggctgcattgggaggattgctggagcccaggagttcaagactggcctgggcaacatagtgagaccctatctctacaaaaaattaaaaaataagctgggtatggtggtgcatgcctgtagtcctagctactagggaggtggaggtgggaggactgtttgagcccaggggttcaaggctgcagtgagccactgcactccagcctggccaacagagagagactctgtcttttaaaaattaaaagaagacttagtttgagtatcactccctctgggagccatctgtgcattccaggtcaggctcctgtctctcctctgtgcccctccaacttcatggtctccatgccccaactccgtgtgtgtcccttggggggcagaccttgggtatcaggccagccctctaccaggcccagagcagcctctacaagtgctcagcttctgtgtattggagttaagaaagcatgacctggggatacccatgccgcccagcagccgacggtaaacctggagtcctcaccgccatgctctgagggaggttctgttcactccacatcataaaccggaaacagcgctggagcagaggcgacagctgggtgcatggtggctggagagcctaggataccaggcaacaaaccttttctgcaaagggccagatggtaaacattttaggctttgtggaccggacagtcactgctatagcttttcaactgcttttgcagggcaaaatcagccataaatgaatgggtgtggctgtgttccaataaaactttatttatagacactgaaacgtgaatttcatatcattttcatgtgtcatgaaatcttctttagattgttttccaatctggtggcaggctgtatttggcctggggactgtaatgggctgattcctggtgcagggtgagaattaaatatgttttcccacctggttcagggccagcctggtcagtcctccctcagggcccagcagctgctcggaggaggaagcagagtcactccatctccagcccaagtggaggacacaaatgagtgaacaaactcacctactatctaaccaactaaccagttaactaagcccttatctcctggattcagagttacccccgcctcctctctgtttttctgtttttttttttgtttgtttgtttgtttgtttttgaagacggggtctaactgtgttgctgaggctggagtgcagtggcacgatcatggcttactacaccctgagctcatgtgatcctcctgcctcggcctcccagaaaggtgggattacaggcatgagacactgtgcccagtcctgtgggcttctttagacccgactgaccccttgttgtctgacctatctctttgacccctggccaggtatcttttcaccccctcaacctgcccaaggtggtgggaacctcaagagaagcccattgagcgcctgaaagctgccgacgaccactcactactgatgtggtgtggcctggcctacagcctggtacaggctagcagaggagatgtgtacagcctcagggctgtgtgtgatggggaagggggctttgggactgggaggggtgtctggctgcacctggagaaggggagggaatggccaggcagacagaggagacattccaggcagtggaatgtcctagacaaaggtgcggaagcgggagctggcggagtgcggggtccctgtaaatccaggacactaaacgcaaggggcttctcgccttgtagggccaaaagccagggcagagctaagcccaccaggagcaaaggctgtggccctacatccctatcctagcactgacccatgcaactggacctgcctatgtggtatgggtcaggaggacgccaggaggcccccacatccccctcctagattgccgaaacatgaatttcatatgattttcatgtgtcacaaaacactattattcttcagattattttttccaaaaaatctgggcagggcatggatgatgggcaggccggacatgtggccattcctatttccgacctgcatttgggttcttcagcattgccctctctcggtcattcattcactctacaaacactggtccttggtgccaacaacctgccagataaaccccttccaggatgcgaatgagacagacacggtccttgcccttgtggaactgacaatccagcagggatgactgacaggtacagtgccatttcagagcacgagaggtgcccgcaatactatgcatctgggcagtgaccaggggtggcttcaggaaggcctccccgatgaggaaaaagaccagccaaggaagactcagcaggagctgccatgtgatgtcctgggggcaggaggcagctgtttgagggacagaaaggaaccgccacagccaagggaggtgcagagtacggaggtctgtggcaggtgggtggccaggagggcctcacagaattcatggggtggctgcaagcagaagaggctggaaaggctttgggggctgggccaggaacacgatctgattgacttttgcaaggatccctggctgctgttgagaggtggagggcaggacctgcagggcgggaggccggtgctcctgggaggctgccgtgtggataagagtcgggggccaagtctcccgctggagcagcatggaaggctgggccggacgtgggcggtgggcaggccccaggactgctgctcttggcctggctctggcgttggcttagcgtgcagccgcgggggagccgtgtgtgggcacgtccctgtgctgccgcccccgctgccccagagacacagccataggcaggctggctcccctgggcctggctcacacgtggtggaggtgatcagggatgacgaggcgggtcgcagggtggcagggacctacagggccccaaggccagcccgggggacagaggactcccttgccaggtccttgttcattcatcccccccctttgtatggtgagaccactgggagccagacacagccctgccccaggggccatggggaaacgagtgtctgtctctggtccggggccaacctcaaggtgggtgtcctctcctgcagcagggccacgggcaccttccggctccagccccagcccagccaggctctgagggagcctgaggctgcctctcctcctccaggttcctgtttcccgggtggccccaaagacagaagatggtgtgaggttcaagggctcagtcccaggctcggatttcctgggcgtgtcagatttcctgggcgctgtgtggctggtgtctgccagggaggccactgaataacgtgaagaccactgggaaagcatagcagagtgtgcagtggctgagtctgtgtgtgtgtgtgtgtgtgtgtgcgtgcgtgtgtctgtgtgggtgtggggtgtgactcacacaggcctgggcttcatgatgtctcttgggagcaggaaggtctgtgtgagtctgtgtctgtctgtgtgtgcatgtgtgtgtgtacccgtgtgactacaagcatgtgtatgagtgcacacagttggtgcaggtgtacctatgtgtctgtgcacatgtgtgtgcatgtctgtgagcgtgtgtgcatgtggttatgagtgtgtctgtgggtacgcatgtgactgtagtgtgtgtgactgtgtgtgtgcacgtgtgtgtgtgtggacacagccctctctggcctgcactcctggagcctgttttcctgctccacctccctcctcggcaagtgttgactcagggagggataggcagccttggttcaggatttcctggtcaggcagaagtggtgccttgaaaagggaacaatctcgtgctaaagtggacgctgagggtccacacagtgcagtgctctagggtgcccaaggccgagagaccttgtgccttccttgcctgggtttacagtgggggtcccagaaagctttgcccctagggtggcccataggatgtgccctcaggctttttctaaatgcttcctgatctgggctgcccggggtgggggctctggagctggacactcctctgactgctgtggaggcagggacagcacccccacaagaggtaccccaagagaaatgggggcccccaatgtccccaggcactagctgtcccaggttcccttccacagtgggcagctttacccctgcaccgccccatcccccaaagccttaacaaataaaaatgaagctctttgaggctaagagtctattcaagctccaagagctctctgccatgttgggaggagccttctagaagcgctgcttctctcaggggctgggagggctggcctcactgggtacgcctgagagatgcagcatcttagtcggcacccatctgccgcgtccacatctgggctgtaccaaggtcccccagaggcgccactgtccctgagagacgctgagtgagcccagggcccaaggacagcagccacttactgtgcaaatgccggaccttccctgtccccaccacctggattcctcccggggtggccctgggtcttgggtcaggcagggaggctgagtggggtgggcagccagcacagccaccatgtccttgtccccctgccccacaggggctgccttctccagctggaggttcaggcctaatccccaggacaaaacagggatttgcatcctaaaagctgctaatgcgggtgctgctcctctgtcagtgcccgcttatcgtagaggaaagacactgtccctggggcgttgggagccgctggtctcagctggttctagggatgatggagacacagctgggtggcatggagctcagctatccttgagctgggtcagcccaagcaggaaccccaagggggcccccgagaacctctagcccagacccctggactcaggcctaggtgcctgtcccactgtagacaccaccccagccctgcgtgctgccaccaaacctgtcccctgccagtgatgtgggcacccctgaccccttgcacccactgggactcttctcctgcacaaggtccctgtccccactgctgcttctgccctgtcccctccctgctgggtgtgacacccagaaaccgggctgtgggaggcaaacatggagctggcttggagagctttagaccccctttcttgccttggggaccccgggatcctggcataggcctgccctgagtggggaaagacgatgtcagagtccctgggactgcagagaacgcggtgtcctccgaagcatgcctgggtccccctgatcagggtggcagcagggggcagtgcctgggctttgggtgctggcccccaccacgctgagcggccacgagcagggctggccgggccgccattaatgattaacttggggcctgggccttgacctcgtgggcctctgagtaaacaggcctgctggagcctgccgggcccctcatggcctctccaccccctgacctctcctgccctcctggtcctggcctccctcacccacctttgctgctgaggtggagcagtggcaggcggtctagaggcgctggcctttctcacccccaccctggatcagcctaccgctgattcctgcccctggccccagcccattctctttggagcctttgaggtgggcttttcttcttggactggggcttgcccactggggtgtctcaagccctgacctcagccccttgcgtccacactgctggggcttgttgagactggccgcgtggagcatgctgtgtagacagtcaggaccggctgtcagaagacctgtgttctagctccagctctggtctcactggctgtgtgacccctagaccatgccctgtctctctgggcctcagtttccccatctgcacaataaaaaatagagcaggaatcccagggctttctaatcccagaattctagatgccagtctggtttggagtgagactgaggataggaaaaacatatgtccccaccccgccccagaggaccccttcccgaagagtcactggggtggacctccaagttcctggctgcccacactcacttccttcttctggggcagccccttgtgttcccttggaggaccagccctcaagctctcagaccaggggcttcaggcagggcagcccctgcctggggctctggaagtgggtcatatgacctgggcctggccaatgggtgtctgccctgagacttttgctggaaatactgagaaaaaaaaatcattttttcttccctagcaaagcaggagaatgtgagccccatggttatcttgctgggcacaaaggaaaggagagctgaggacccgacacgggttttgacgacggagccccagctgtgcccgaaccggcaccttgtggacttttccatggcaagaaccagtggattccttttctgctcaaaccagtgagagttgggtctcttccctgattcacacattcacacactggactcacaccatgcaggcacagaggctacaaatgcacagttgtcaccgttacacacgcaccgcgaaacatctgtggagaaaatgtgcgtgacaaacagggctggggagggaacccggctggccgcagtgagcaagggtggcagggggtgggagaatgtgggcccagggtgccgacccaagctctctccctgtcacttcacccgccatttgcccatcatccccacgtccagaaccctcagccggccattgtggatgatgggcgaatggcggctgaggtgggcaggctgaagctgattggccagggacagaggtgaatgctcctgtttgcacgtgtgcgtgtgttcacatgcacgctgagctttgcatgcaagaaacatgctgtggcccactcggggagcactttcagtccctccccactgcagaggcctgaagctcagtgagtcggggaggggtctctggtcagtcgggccctcctccaccctgggactgtgtggttcctgggagctcaagggccacctgggtgggggcaacccgaggagaagggactgcctcttctgctccactgtgggatagaaggatcaccagggccttctgcaggagcagagaatccgcctcatttgggcctccccagttctccaaggagtgctggcctcatggggctatactgggggagaggctttgttctggagcccaggctgcctttatgacactgggtagtccagggtcctagatgcagatggcttcaggcatattgcacataccacatgcacacgcagacacgcacacagatgcatatgggcacacgcaggcacagctatcttgtgtgagctctgcggatggaaaaggagaagctttctgtggacagggaacaatggcgacagaggaaccccttggccctcctgggaaggccccaccccacagcttggctcttgccaggccccttgggctctagcctggggaagggctctcagccagcagcaggaatagctggatcaggtgtctggagataaccctggctccctgctgctggctaaaagcccttcccccaaagctctgtcttcccctcctgctcctcttcctctccgtgccttgcttttggactttcaggccacatcacattcctttttcttttcttttctttttttctttctttttttcttttttttgtagagatggggtcttgctatgttgcccaggctgacctccaacccctggcctcaagggatcctcctgcctcagccttctaaagtgctgggatgactctgactctttctctgcttcctcctgtctctgttggtcccagtttctgtctctctaggggggcatcccaggagaggggcaaggttcaggcctcagggcttaagccccttggctgctgggccaggccttcctctttctgctgtctgtcccctgccctgcttccttactctggccagagccgacttgccctttgccctggagctgcggcacctcggggttgggggaactgatggcctcacctcccccaccccctgcagcccctgctcctccccacaggagtctggccagagagttgggccctggggaggccacacagccaggacacatgtcctggccccaggcagaacccttgccctggccacagagccacaccagccaggtcaactctgtcctctgaaatccctggagaccagggcaagccccccccacccactccctggggcagcttcggactcccactcacctccaggttgggaaaactgacccccagcccagggcaggaggcaggatgtggaagggcctctagcagagctgaggtccagccggccatgtcgggggaaggacgaccctgtaccctgtcattcccctcacagtgtgaggccccagggaataacctgccctggcaggggactgagaagcaggagcagtttcccagctctggagcatgctgggtgggagcaggcacggggcgtctctgggggtggggagcagcccctccttgcctaggcagtcactttctgggggccagcacttcccacactctcttttttttttttgagacagagtctcactttgtcacccaggctggagtgcagtggcacgacctcggctcgctgcaacttccacctcctgggttcaagcaattctccagcctcagcctcccaagtagctaggattacaggcgtgtgccaccacacccagctaattttttgtatttttagtagagatgggggttccccatgttggccaggctggtctcgaattcctgttgattctcgaattcctggtgatccacctgccttgacctcccaaagtgctgggattacaggtgtggggcatcacgtccggcacttcccatgctctcagagcattcactgctgctgtccaggtcagagtctgccagtgccctcctccaggaagcccacctgggctggaccagaagaggcaggagcctgaagcagccggccttcctccccaccacacaccgggaccggggcttcccctcgccacactgattaggctggaagtggggggcttccagcttcccacttctggaagaccccacctgcacccagcctgcctggggctcagggctgcattgaaaatgcctgactttccaccccagagtccagggcaaggcacagcttctgataacccctgggctgatgtttgagcaaggcccctgggaaaaagtcctcaggccttactgagcccagtgctgccgctgttgctacagcagacaacctggggcaacgtctccggaagctggagaacgggcaggtggggcagccacaaagagggctccagcggtgtcggctgcctcggtgtgcggttcactgtggctgtgtccacctgctgccttcctctctgggcacttccactgatatctgggaggaggccacctccaggggttgtgagcactcaaatgagacaatgtgggcaagtgcctggcctgctgcttggcgcacactgaaccctcaatgaatgcagccatcagccctgctcaggctggcagggttgtgaggactggaggatccaggtcatctctgcagaccagggcaaggcctactgctggacaaggggaaggcttgggactaaatctctgccttcctggcccccagagtccacaaggcacaaatgtgcacttgcacgccccccccaacacacatacacacacacatacacacacacacatacacatacacacacacacatacacatacacacacacacacacacacacacacatacacacatacatacacatacacacacacacatacacacacacacacctggcttggcttcccattacccagccacctgctggaaaaccaagagctgtctcttgaaaaggatgattaagaaccagccttgactactcaaactgaaactccaaaccctcctctggggtacccagctcctctggagcctgtgggcgaaaagctcttaccatagtggaaaaaatattctgccgaaacggaagtcttcctcaatttagctgagtcattttcttgtggttaaggaagtccgggttacctctggcccttcccctgatgcccatggcctagccagcttgggggaccccagtccacactcccgccctggcagggggcatgcccatcccggcaaacctgcagggcccttgattgtaagtcaccccactcaccccgggctgcttctcaccactgtttcctgtgctgaagtgggagtccagacccccaagaaccaggatccagggtcactgatcaccaggtcaccaggggcagctcctacaggcctggggtctgcctgcgcttcctgtcggggatggtggccccttgaggatagaggcctcctgtggattgacactctgctcctgtgtccccagcttgggcagctcttagcacgaggtcggtatcaggagcccagtctcccagcattcagcagctcacagatcccccaaggagccggtagcttggaatgagttcctagtggatgggcagtggaggggctgggtgccaggccctgcttagatctcagacccagttgggctcatggcaaccagggatggaacctgtttcattctggatcctaggagtctgagcctgcaggccaaggcacctggcccaggtgtggcagagccttgcccagtcggggctctggctggagggaggctggtgctggtgggtgccccaccctggctgcaggtggctgcctcctccccgggagaccttttggaaggtgccagaggctgttgtgggggaaggcggagagatgacggggcgggccacctgagtgccgtggggagagccttgaaggtgccaagtggtgccagttgcaggtggggcgtggaggccagctctgtgggcgctgggtccttcccctgcggccacaccgtgtgccaggaacgagagaccccctggctgtgcgttccaccctggccctccatctgagccctgggctactggggaggcagcaggagcccgggcagacggctcatctgagctcggccttctgtcagctgacaggggtcacgtgctgtctgggcttgcctggggcctgagaaatggggatgcggacagccattgtcagggctgttggggaaattcaaggaatggaagagtcagagggagttgggaggccatgtctcggtgtgtgcgggggcatcgaaagccctgctggatttgggggatcaaaggaccgccacgcatcacttgtggggtctcgggatgatgggggtcaggcctgctctttgctggggaggccagtggctagcaaggtctggggctcagtgaataaggccacgcttgcagccgcccttgtcccagtgcttggagagccaccaggcagactttatctgcatccctggaagtgacctgaagagactgccgggcactagaggggtccatgtgggacccggaacccaaaggatcaggttcaccaaagcctggacttccctggagggcccctgacccgtctcagcggccgtcaggcatccgccagctgggccctgcgggctgtgctgcccggtgactccagagtcctcccacacccacttggactgggtcctcccgtggctctggcagccaaggtttgggaaattaggtgaggggggcctgggacgagggtgaggaaaggaacaatttatgttcaaaagtcatcttgaaattttcaacatatttttttatttttcaaaacaaaagctctaaatgttggggctggggggtggcggtggacctagctttgtgggaagtgagtcagatggccataaaatgtgtttttctgagccgaggggattattttacatcttgtggcatggagacgccaggaggaagccctcctcctggtccctggtggggctgcctgctgctgggcctcagcactgatctctcttcttgagatgggggctcctgcccttccaggacccctcatcagccctctccctccctgacctcacatcccgttcttttaggcaagagtgaggctgggaaggtcgtggcttcatggtggggcctcgtactggctgtgccatgccagagaatctgggtaaagtatgccttggggaccctccccaacccctcgtctgatggataggctgatggcgggaccacctcccagaacagccaccagcatgaaaggagggatttgagaactcatttgcaggccgtcagggctcggcaagtgggtgccctcccacctccaagaacatccttgagtgcaggtgaatgaatgaagggcaaaaggggcaactaggctctttggagacccttcctaaagccagaggcgcaggggtcctcccctaatctccgctatcaacggcatcttccctgggaccacagcggggcagtggtggctcaggggaaaagtcatcttgaaatgttcaacatatttttttatttttcaaaataaaagctctaaatgttggggctgggggttggcggcggacctagctttgtgggaagtgagtcttcccagggaagaggacgctgagtccccacctcagcgaccagagacctcagaggggctagggtcagggactccagatgcccatcaggacaggacctggtggcttcagaggcctcagggtacaggtcccaccacccaaggcagggactgggtgggacccgtagggagggctccgcctggagcctcccatgccctctgcctcgctgggggctgctgtccactgccatgcatatcccctgaaccctgccttccctgggctggagtcacaggccccatgaacagcttggggtccaagagcccacgctgcctgtgaagggagacccctggtagcctgaggccggcagaaatggggaagaaatctggggcccaaaccacactggctgattccagaaaccctccacccttctcttgaagctgcagtaaaggggtctccctgagccatccccactgaccatgggctctgcttcttcctgggaccaaggccaggcacagtggacacccactgttttgcctgtctcagcatccatttctctccttccaaccaacacatggattttccttggagaacctccctcccccacgctcattccttgcagtgtgggtggggctgagcccccaaactgtgtgtgtgtgtgtgtgtgtgttggaagtgtggggtaaggacgtgactcaggactggccaatcagcgtcttctatgctcctggatacagtggctggttcagtgatgagcccatggtccaacagcatccaattctggaatttctaatggaattatttagaaatggaagctctacggccgggcgcagtggctcaagcctgtaatctcagcactttgggaggccaagttgggcggatcacttgaggccaggagttcaaaaccagcctggccaacatgccgaaaccctatctttactaaaaatacaaaaattagcccggcatggtggcacacacttgtaatcacagctactcgggaggctgaggcacgagaatcgcttgaactcaggaggtcgaggttgcagttgagccaagatcgcatcatgcactccagccagggcgagagagtgagaccctgtctcaaaagaaagaaagaaatggaagctttagtccaagttgttgggtgtctgtttggaagccttagttactgggaatccccaacaagtggctgaagccagcgcaaaggatggcaaaagcaggagatggaatgggaaaggactctagatgacataatttgggctgctggatccagccacgcctgaagatgaatcctgattgttttcctcattgtgcccggctctgttcctgaatctccatctagaggcagaatttttggtgagatgtgtcagtgtcgtgtgcccttttctgatcaggccactcgagctgggatcctgtgtgcataagccggttactgagagctagaacctgcgtggggtgaggggcctgtcagggcaaccagcacacagctgggctcaccaactacaggagctggatacgtgggtgagaatgggagtcaggtagctccctgcaaaggcctgtcctcgggggtgagtttgggagaagacttcatgggaagtagctcatgattttccaattattaaacctagaaaaagaaccagcagaacattctctttgccttcatctttctgtctttccaatgggtaccttgacacgtccagggcactgagctgtggagaaccggttaattttgtcagatgtcagccttcctgacactggaatgtaagctcccgatggcagaactcctgcaaaaagtggctcactgctgtgtctgcggcttaggagagctctcggcactcagtgaatacttggtgaatgaggaaaaggcgtgatgctgtcactctctttctcgaaacactcaaatgccttcctattgcagctaaaatatataaaagctatactttttgctctgccctctaagtagagtgactgtgtcatttgttgaacaagcaggggcattttttttgcaggtcaaagggaatgctaccaattaggctggaacaatgggagcaagccagaattattccaggcaaagtgggatgcatgccttccccagatccaaggccccccgggatgctggtttctgtcccaggcgtcagcctcattttctgccctccgagtcacgggccacaccgaccctccatcagaacttcgcactgtctgtttctctatctggagaagtcctttgagtggctcagtcttttctggcacctcggtttccactgcacaccacctactcaaagaacctacccaaagaactcttttctgacacccatcctcacccaggcagcctctaccaataggctgtgtttcctgttcctcattgccctggactctatgcaggcaggcagggagtgagcactgaatttcagggcacagctcccaagcttctgtcatcctccgagtaggtgcttgtgtgcccagcacgtgtcttcaaagggaaagtgaagtgaagccagtgtcagcgcagaagtggggtggaaggggaggaaagacaaaggaaaggcaagaagaaatgaagcctgtggcagagaggccaagtcacggctctatgcacagcttcaaaaccagtgagtccactccagaaatcagatgcactttgacctcaatcactgcggcacctcttttttttgttttgttttgcactcttgtcgcccaggctggagtgcaatagagccatctcggctcactgcaacccctgcctccggagttcaagtgattctcccgccttagccccccaagaagctgggattccaagtgcctgccaccacacccggctaatttttgtatttttagtacagagggggtttcgccatgctgttcaggctggtcttgaactccaggactcaggtgatccaccctcctcggcctcccaaagtgctgggattacaggcatgagccaccacacccggcctggggcacctcttttaagatgtgtttggaagcggcatttgaatgcagattccccctgccccgccccatggctggaattcctgtagacacatgcaggaattgtgcagccacagaggccaccacatacgttcctcattttcccgatttcctctgtccttgctgctattggggctctgtaacattgtcccagctgtgtttgtcatttggctctggctttccatgcacacctgtgggtgtttgtttatagaatgcagacaccacccctttggctgccacgagggactggccctggggactggcctccaggatccccagacagatttgcttctctgccttctaatttttttttcttttcaagacaggatcttgctctgttgcccaggctcactgcaacctctgcctcctgggctgaaacaatcctccaacctcagcctcccaagtagctgggactacaggcatgcaccaccacgcccagctaatttttgtatttttagtagagacaggatttcaccatgttgcccaggctggtcttgaactcctcgcctcaagtgatccgcccacctcagcctcccaaagtgtggggattgcagaggtaagccaccgcacccggccttctctgccttctttaaagcaaaaggactggagtagcagggatccctcagggtcctggctgaaaccaaactcaaccctgatgattccaataaagatccctttatttaaccagggggccagtttatggaggtgtgagcaggggtaagggaatgaggatgggatgctgaggccccagaagctggccatggcaaccatcatcaccacctatcaggctgaaggggcgaggggaggaatcgatgctactggatcctcgtggagggcggagaacaggccacctgacaggggttgtagtcttgcgggtgcagatggggcatggacgcagaagagagcagagaagaaacaccgcagcctctctctccttcctccgtctgatttcctgctggtgccgcccattggccaaacccaacaggaagccagacggcctgggaggccctgagtgcggcccacacagagcagactccagggcccagggcaggatgtagaggggatgggggcagaaaaccagcacaggcgggtaaggcaaccgggaacaagtctatgctcagtcttggtgcaaatcctccttttctgtggctccatccacctctggccacagagcttcctcactgggctgacagaggtccttttgctggttacaacccatgctccacacaccagcagagtgatcttaataagcaaacctggcctggtacggtggctaaggccagtcatcccagcactgtgggaggctgaggggagtggatcgtttgagcccaggagtttgagaccagcttgggaagcacagcaagactccgtctctacaaaaaattaaaaagttagctgggtatggttggacatgcctgtagtctcagctacttgggaggctgaggcaagaggatagcctgggcatggaaggtcaaggctgcaatgagctatgatcacaccactgcactctagcctgggcaacagagtaagaccctgtctcaacaacaacaacaacaacaacaaacaaacagaaagcaaacctgtcctccatgttctgtatggctcctgttgctcttgggatattgactaaatctgaacccctgcgtgtgagagcctgtgtagtctgacccagctgaccctctgacctcgcctcttgtcctccacctcccttacgccccactccctgctctgtgcactgtggccacactggatatttttcaggacctaagaatgtcatgctccttctcaattctgagttttgtatatgctgttccctctgctgggattcttttgctccaaccccagctacttataaataccacttcagatcttcagatctcagcttaagaaaacacacccctaagagtgacttccctgagtctacaaagcaggtgaggactctgggcagacactctcaccacccctgaatttccttacttcacaatatgtgtcacaactgcaattagctaataaattgtgtcactctctgtttactgtctgtctccccagagaaactaggagctccccaagatcctggtctgtctgtctgtttcactgctgtgttcacagcatagtgcctggcacataggaggcactccaccaacacttgatgaatgaatgaaaggaggacttccagttcccagtacaggcacacttgattatttgggcttatcctcttgctgtaaacagctggattaaaaaaaattaaaatgtattaaaaggaaggaaggggaccaccaggccaaaattgaggagaaaaggaatccagacaggtgagcaagagaagaagccactttttccctgggacacattctgcaccccaaaaatgcaaatcttgttttgatagcttcatggaatgaaagagacagaaatcagactttggggctcatacaaggtggggcatataataggacacccatcccatgttgatgcagaacttcaaagggctacaccctcgggataaaggtgaaccagaagtaaaccagaagtaaaccagccctcatatgaacttccaatctaagttctcatctcctggatgggatagggaccactaaaccttaatagttgattaaggtgtccctggaatgtcagtattccttggtgtttggcaggagaaaatgaaaatgatctccagtggaaggcacctttgtcctaaatctttcttataaacgatttatcaaaacaatgaccagcacatagtcaaagataatcagacacacacacaagacactgtgagtaaaaattggaagaactgatacacagacttcaaattattgactataaagtaattgtgcctatgatgtttaaagaaataagacatgcttaaaaataactgcagaaatgggaatctataaaaagtgaaatatcagatctgcaaaagaatcaagtaggatctctagaaatgaaaactacaataaccaagaccaagaacatcaatggacaggtttaacagattaaacacagctgagaagagaattagtaaactagaaaggatgtcagaagaaattatcacaattgtagtacataaagacaaaaagaaaatacaaaagagaagatatgagataaagaataagacctaatatatttcatattgtccttgaaggtgaggagagaggaaatggagtggagccattgttttaaggatgaatatgggtaaacattttctggaactgatacatgactgtgtgagaagaaaaactgagtcattgtgccttggtgacaatcaatccatctcccatgtttcagacaacctagaattcaaaacatactaatgggagattctggacctagtctactcttggtcaaaggccacagtgttgtacaataccaagtaaaatatagcaaatgacacatgaaaacaagatcaggagtgagaaatcaactcttgcctgtctcctgcctctgtggttcacccctgccttcttaggaactatttgggccactctgagatgaccacagctgtgtcctcctgttccttcttccctcccatgggccttgctgaccagcactaggagatagcaagacaacattccacaggcaactgggggtccagtggcatgagtgggtgggtgaggaatgcctctctcccaccctgattcagtgctgatgctgatatcttcctcctagacactgttcctcttctgtccaccgacctttgtctccccattctgtgcctgggcccttaagggtgcttggtggagactcattcactagctgactgatatgaattggtccaaaggagctttgtccctcgcttcccagcacaccagcatcacctgggacctggctgtcaaagacctaggagctgggctccaggggcaggcagggtattacccaaccctgggtcctaccatcctctacctcccagccttgtgctttcttggacaggcgagtgatctggctggcaggtgggtagcttgtttgtgactcacgctccccaccttggtggccaggtggcctggtccctggcctcctcatggtgactcgtcctggaatcaggttcctgcagttgctctgttctggagggacaccattcatcatcttgcctctgggaatctcggcacgcctctcagacatgctcaaacagagaggctgccaaacctgtgccgggtcacacagcaggtgtgtgatgaggccagggcgcacacacagtcccacacccccagtgggcgggaaggcaggcccagcccttgtgtaaccagcgtcagggcctgggcactgtgagcagcttcatggtggagctcagggaggccctggtcccacccttgtcctcaggcatgtgccagattcccccacccccagcagcaggtccctccaggcccctgtgctgggcaggacaccagtcccagggcaaaagcagagaggggtggccaagtggtggttgatctctcagcccctaatgagcaaagcctggggtgtcatgtggtctcccagatctggctctgcaatgtctcagacatgccgttcgattttgaaattctcaaagatgttccaaacagcatgcagttgatttaattttttaaattgaaaactaaaggaaattgagttgaagaatgttgagtggaggcagtggcgggaggtgtgatggaattgagccaatcatgagggcattggggaaacaggagcatttcactcccctgggtggatttgggggtacagagggttaaactaccccactggatggggagtctaggagctcaggtgccgctcctgcctgtgttccagccctggtcttatcactgcttccggtgagaagggtccctgaggggcctaggctctatggcactgggcacctggctggggcatctcctaggatgcctggctcctgggtgagcggctgggaccctgaggagtctgatgcttcccagggaggcagaggaacccagagcaggctgctgtccctccagcgtggctcacgcaccgcccccaggcagcgctgccccatatagcaacatcactgcctcactcaagatgctcacctcacctctgacacatttcaggcttggagccatcgtccccacctcccctcggctcaggggcctggcctgtgactcatgcctccacctctcccagacaagattgctccttgaacaaaggagcacaggccttggtgaacttgggaattgcacttgaggggaccctgagcccctgggtctgacccctccagccctgcatcggccttgagatcacatgcaggtggcacgtggctgcacccgcaccagcacccccacatcgcccctctccccggttgctctgggagtcacccacaccccagcctctcctctgtcctttctgctgccctgcaccgagcccagctgatctgcagggtgaagaagccaatgatttaaggcctcccagcccctcttcataattgtggccctcctttgccttggcaagtggaatccaacagcttcctgtgcttgaacagggagacgaaggggcccaagagctgcctgccttccttgcctgaggagtttgcttattaacttgaattaccctcgtggtagcattcctggcagggcagggaagagcagggttggtttctagaaccttttcctgttggcggccccggcgctagggaagcttggctgaggcctcctcctacctgccttcttgcccctcctccaggacaccccaggaccccagaagcttccctggttgttggaagccctgcctgggtggctctcctgcagggctcacgctgacctcctgggcccgagctgggttgggcaaatggaaaccagctgtgatgccaagtgctgagatgacacagttgagaagtgagggggcaagggagcaggatgtgtcccccacccctgacacacacagcacatgtctctggctcccttctcaccagcaaggggaaggcaggacccccaccctcacccctttacttgctgaggtcacagccttccaaacagaagttaactgggaggcccttggggccgaggactctctcagtacctggggaggctgccaccccagtgagaatacttgttctctcttgaactccccatgggtcgtcacctgggattctgcacttgtatgaaggacattaaaacaaatcttgtagagatgggggtctggctatgctgcccagtcttatctcaaactcctggcttcaagccatcctcccacttcggcctcccaaagcgctgggattacaggcatgagccactgcgcctggcccacgaagagcattttacttcgacaagcacacggggcacctgtgcctgctcatctgagtgtcgtacaggctttgaccactgtgcttagccttcaaagtcactggcaagggggctctgcccccagaatgagctcattaagtgttttctaagcaaatgaaaggcatcctttgtgggggggagggggtgtggaaatctaagcaacattaaaatgacttcagttgtttggttatttggaacaagcattttgccctaaattcttaagaaggctgtctccttccactgcgtttttcagggaccaaggtgtgccctagcctcccactctgccttctgccccagcacgtgggaatcattagctggagccaagtgtctcataagctttccctgtttatctttcacaactccatgacatgctacttgttttgcatacattttgcataaaaggaaactgaagctcggagaaactgacagactcagtgcggggccacccagtcagcaggaggcaaggccaggatttggtttgatgccaggatggcacggccctcttcccatgggccatcctcatcacgggatgggagaaacgggaaacgcctccttgtcacccgtgaacaaactgctttgctccagaaaccgactcagcacacacctcgagtgtgcactctgtcagggtgcccgggcttcacttacgtgtccggtacgagactgaaggcccactgtgagccagggttctgtagccttcagctccatgcccagtggtcctggctccaggcaagtagcacttgtgatgctgaatgaggcatatatttcagcatgacagaccacagtgccttcagattgttccgggataaatcctttgtcctgtggcctcctgggctaaggccaattaaacagctgccaggtagggcttattccctataaatcagtgggaatgtggccacatgaattttaaatatcagattaaaatcaaattagtgggaaaatttggaacaaattgccttcaagtacagtgaatgagtctatttttaaaacactgccgcaccaggcaaaagagtgaagcaaacacacatttcctaacagcgagtagacaccgtgctgggagtgatctgtcatgcttagtcacggtaattgctctagcaaaactcaggaatcaaataaaacgtgtttgcaaattgtaaatcgctccaggaggctacttcagacgggtcctaacctgatgctgaaggtcacggcggctccctttggagcagacacccagccctgacgcccccttgacccatccccaccccctttctctgagcaggggttgagccggctgagaccattgcccaacatgtgcacgggaaaggccgctgtaaatcagccacatttccgcatctgcgggagggcatggcattcttggggggtgctggggagggtgctctggttggctggagggaggtgagggagtctccgaggccaccatggccgaggcagagaagaaatggcggcggtggctcagggaagagaggctgtgtttctggtgaaaggttgggctgccatttggctgaagaaaagatcttcagatccaagagggcttgggacaggcggtgagggctccctcaagccccgtccgggtccctgtgtgacatgccctggctctaggccaccacatttggtccctagcctccccaccctcaggctgtagtccctcaataacaaccttgccagtcgtcctagagtggagataagaggagagacatgaagccttgaaatagcttttaaagcagaaatgtggccgttctcgttcccccgtgctcacctgcggctcctgcagcttgggggcagacagggctgcttctcccctaccctgtcctctcttttggaaatcttacctcctccccgcacagtctcctgcagagcatgactgtctctctggggcctggccagacctctgattctggtgataaactaatcacatgaaggcagggaagattatctaggaccggatgggttacctttcttaggattcttgaatgttaaaagtaacttcaggggccgggtgctgtggctcatgcctgtaatcccagtgctttgggaagccgaagagagagggtcgcttgagcccaggagttccagaccagcctgggcaacaaagtgaaatcccttctctacaaaaatatttgaaaattagcctggtgtagtggaatgtgcctatagtcccagctacttgacctcttgagtccaggaggtggaggttgtactcccgcctgggcaacagagagagaccctgactcaaaagaacaaaacaggccagtcatggtggctcacgcctgtaatcccaacactctgggaggcccaggagggtggatcacctgaagtcaggggttcgagaccagcctggccaacatggtgaaacccctgtctctactaaaaatacaaaaagtacctgggtgtggtggtgtgtgcctgtaatcccagctactcaggaggccaaggcaggagaatcacttgaacccgggaggtggaggttgcagtgagctgagaatgcaccattgcattccagcccgggcgacaagagtgaaatcccatctcaaaaaaaaaaaaaaaaaagccaggcgtgttggctcacacctgtaatcccagcacttttggaggccaaggtaggcgaatcactagaggtcaggagttcgaggccagcctagccaacatggtgaaaccccatcgctactaaaaatataaaaaaaaaaatttagccaggcttggtggtgcatgcttgtaatctcagctacttaggaggctgaggcaggagaatcacttgaatctgggaagcagaggttgcagtgagctgaaattgcgccactgcactccagcctgggcaacagagtgagactttgtcaaacaaaaccaaacaacaaagtaactgtagaagctgcaactcagtgggccaccacgggggagccttatttactgtgctcttgcgttgcctctgacaatggtgcggcttgcttggcggaccttgggccaacccaatggacccttggatagaaaggagagggtgaggatgtcttgtaaagaaggagagagatccttgcattcaaacacgtatgttcaagatctgcatagccagacactgaaaatctgctgcggccaagttcagtaggaggccaagacaggcaggaaggaccccaggagtggtcatttgatttggctttaggggctggtgtgaccttgaggagaagagtttccagggaggataaaggtggaggatgaggatgaggggacagtgaggatgagtgtcagaaaatggctctctggctatgtgacaaccacaaaggatgtttcttaaacaagctagtttcccaccccagcttgatggctgcaggagaactacgtctttaagtcgggtgagcctgcagacaagtctgaaaaacggggctgctatagaagagtctcacttcttggctctgcctagaaaaggctttgaattcgtagaggattctttgcctgtcgccctggtccagcctcttctgggcccctcgaggtagctgggcagtgtgaaccctgtgccccgctgccccagaaatcatgctggcttttgagagctcagctggtcttgctcaaagtgtctaccactttgcattctgttttttcttatttttgagacagggtcttgctctgttgtccaggctggagtacagtggtgtgatctacagcctccaactcctaggctcaaacgatcctcccacctcagcctcccgagtagctgagactacaagcatgtgacaccacacttggataatgtttttggagacaaagggtctcactatgttgcccagactgttcttgaactcctgggctcaagcaatcctcccacctcagtctctcaaagtgctggaattacaggtatgaaccactgcacccagcctttgcattctaaggggagtttctggacttcaggcctactggagttccccaacactgtcttctgctattgtcaagcacaggcagcggatgtgggcacagcaaatggagagaaagggtgtctatgccagccaaacccggagaggcctgttcctagtgggtggggccagaaggctagaaaaatataaataaaaacaaaccgaagggaagcaaagctcttgggtgccagaacggggctggccagggctgcagctgtctgagtaatgggttccacatttgtctggcttggtctgcagccaccaggatccagggtgcactgtgggccttgcaagggctggaggggacagtgcagctgcagctggacctagcatacccttacggcggccccatccccggccgccacaacagggtggagatgtcgctgcgagcttccacttcggcaccccagcttccctcccctcacagccccacccctgcctggggctcctgggttcccccggccaacacagattgttcgtgttattaatgccgttttcccagagattccatctggctttttaattgctctgggatggggctaggatgctttgatagtgaatcggtatcttccctgggcctcagcttacgtcaaacactccatcggcagagaggggcgtgggggagggggagaggtggggttgtccagagagaagagatagcaagagtctttcacagaatcaagaaagctttcaaaggtgctagtgggttagttttatctaaagaaaggaaaaagaggcctggcagggtggctcacgcttgtaatcccagcactttgggaggctgaggagggaagatcacttgaggccggcaattctgaaccagcctgggaaacacagtgagacccccacctctacgaaaaataaaattaatcccagcagctacttaaaggctgagtaggaggctgaggcacgaggattgtatgagttcaggagtttgaggttgtgggagtggtgactgcaccactgtacaccatcctgggtgacaaagtgagaccctgtctctaaaaaaagaaaagaacagaaaagccttcccgtcctcactagtataggaaagaaacagctggaatatcaacaccatctaggcaaggactctgccccatgcctggagaaggcctgtgggtgccttggaggcccctcttggctaaacaaagtcaggggtttctgctatcccttgtccttccccatgagtggccccttcccctcctgtgagaccagcagctcctggaggaggcctggcaggttcctgcctgggaaggagcaggtgggagagctgggaggggcagacactcctcaccaggcccagtggctcatcgcaggtgtcagggccaaaccccacgttcacagattcccaggagatccaggagataacagtaatatccgtgacagcactaagccatcaggacgcatctggcagcagaggagatgcctccctcccttctacccttgccctttccttgaaggccagctaaccctgaacagcgctgtcacgggacacagggctcaggagtggcgcagcaaggggggcgaggtccctgcagtcaggtgctacatgtcaaggggagatcgatcagggcaaaggagaagcatccaggcatcttgggactggggccagcaggaggccaccctccccaggtatttcatcaaagctgctgcctccataaagccctccctggtggaccctgttcacactctgagatccccttcattgcacttggcaaccttaaaccacagcttagggcctcaagggtgtgagctccccaagagccagagcagagtcggcttgttcccagcccagtgccccatctttggcgcaggccctggcatacagtaggcatctgataaatacttgaggtgtgttcagtgctgggctcttggaatggttcttcctgaaggctgtagtcaggaggggaactgtgaggaaccctgcaggaagcggtgggtggccaagggtgactctgttcccgggaagcccctacagctggacacggggtacatgctgggcaggttcaccccatgccgcccaaaagaccttcctcccctctactttggccccccccgggggcctcgccctcctcatccctttcctggggctggatgtgattggatccttcttgtccctaacaaagcccaccctggaactcaggaccaggaggaggactcggggtaggagggatcccttccgggagccatcagctttaaaagaggaagcccctagcgggctggcacagcagagaggaggggaaggagtgagggcaggagggtcgccccaccccctcccgtcctaggacctgttctggggggaaagggggaagccagggatcagccccctcaaacaagaaaaactggaattagcactgaactcagagggtttgctggggcttagcaagctgcgacctgccccaggcctcggggcacgcggcggggctctgcctcctctgttcccagggtggcggggcaggcgccgcctcctcactgggctcgtggcctctcctctgccaagggcggccgtgggtgaggaggcggccagacacaggacagagtggggggccggaaggggtgccagctaaccacgcaggcaggtaaagctaagcttccagagtgtaaaaggaatgtgtaatttctcgaaaatgccccagcccgcattggtacacacagtaagccactcagtgaacattctctcggtacagagttaaaaaaaaaagaaaagtgcaatttatcttttaccctccgtgagggtaaaatctgaaaagcaccatcagcctcctgggcctctttctcccgggccttgttagttcagggataagggctgccctcccttgcttggctgtcactgctgctaagggggtgccggagtgcctgaccttacagggtgctcattggagttgggggcacaccagcactcagtcccctgctgggtctgggatgaatgcagtggggagtgtggatgctgggtgggttcttgaacagccagtgtgtggggcaggaccagacccctgttgcaggcctgcctcagccccctttcttgtgagggctggggctgggcaggtgtggagggctggatggaggggtctctctcttcaggctgccttcgggcctcgcaggggtagggtgtagccacatggtctagggaaagaggagagggttggagggtcctaccactggaggcctcttcctgctggccgagggtcctgctggaatctggagctgcggtgtgtgtgagtggccagggctgcagctgtaggtgatttgcaaggaagtctgcacaaagggctccttgagcctagggctgcttagccaggcctacccctcaggcagaggactccctctcctcctccccggggcagataagaagcctcgccaaggcctcagcccagtaaccccttcagccccctcccctgaccccaagagactgccttcaggctctggacatactccatttggagccttgtcctctgctatttatttgtcttgcctgggggaagtaagtcacccccttagggtaagaggggctcaggatggatggagagctcatgaaagtcaggattgccgccagggaaaatgctgtattatttacaaatgtgacctggcccacagacaaccttggaagtagcttctttctggttttaaaaagacaccgacattgactttgatatgtttatattatagatataatacataaaacatctagagtgagactctacgttctccccaaaagaagagaaccaagccgtccttccctgctcccagccccagtgatgcgttggcgggaggccacctcccttcccgaccaggagccagggcctctgggggacaagccttgtgggcagcccaggccggaggggctggggaaagctgagggcaaaggagaacccccctcacctcattggtcccccaggatcaaaagtaatcccaaaaccaaaaggaaagggagtctcagacccttcccccagctgccgacggagagtctcattttggcaagtatccgagcaaaaccaaaacaaaacaaaaaccaaataaaatggtggtttagcagagacgcgcacattcacattgcacaaggcactgctggggcacagaggccagatacaagtgttgatatcggctgataaagcaaaatatttggaaagcttgtcataactccggtccctctgggatggactgatcgtgcttcgtgttcctaggcaatgctgaaggcatacagtacaaacaaggctgagggtcccagtggcccttcaccccccatgcccgccccacagccagatctctaggtctccctctcccaccaggggtatacatcctcagagctgacccacgacctagctttctggtgtgactcggggtgggggctcccactggtcacctggtgacccccatcgcagtgagttccgccccaaggggaagcccagcctatagcaggctggggtggggtgtgtgcggagggaggtgggagaggcgtggaactagagaccctccaccttcatgtagaactaggggaacaaccttaggttccaagccccaagtccctatgtttccacccctttctaaggacaggcgtggaggagcggctggggctggcgggcttgtcgggatctcagctccctgagccctcctcctgccacgggcctgctcccctccttctctcatgggggtctgctgtagcctcgggaaggaggcaggaaacctccaaataaaatgacaaggcacgatttgctccccctactcagtaggcattggagcggtgagtttgcatttccaaggcacaaggttatcctaaatactagagttgccgggctcccagctcagccccaagaattctcccctcctcgcagggagaagccaccgcctggccccctcatcttagacgcaccaagtccggcgcagaggaagggaggggacacgcggagcaggccaggctttcaggaggcaccggaatctcctagtcctggctcgcacggctcgggcaagcctcgagatccggcgaccccaaaccactccctgggtccccgccggaggctggcccagggcggtcccacagccgcgcgcctcacgcgcagttgcccatggccttgaccaaggagctctctggcagctggcggaagatgccccgcagcgtgtccagttcgcggctcagctgttccacccgcttgcgcaggcggtcattgtcactggtcagctccagcaccttctgctgcgtctccacgttgcgctgcttggccttgtcgcggctcttgcgcaccgcgatgttgttgcgctcgcgccgcacccggtactcgttgctgttcttgtccaccgacttcttggccttgcccgcgccgctgccgccactcgcgcggaggtcggggtgcgcggcgcccagccccttgagcgcgctgccagggcccggcaggccggcggcaccgagcgcgggcgcggggtgcgggctgggcacgggcgtgggcggcggcgtggggtgaccgggctgcaggtgcatggtggtctggccgcagtgcgcgatctggaactgcaggtgcggggcggccaggtgcgcgggcggcgggtgcgggtgcgggtgcgagggcggcggcggcggcggcggctggtaagggaagaggccggccagcgccagctgcttggcttcatcctcctcgcggggctcctgcttgatcaccagcggccgcagcgccggcgccccgacgcgctcgtacaggggctccagcctgccgtccaggtagccggcggccgcgcagccgtagccgggcgggggcccgtgcgctcccccgggcatgacggcgccgccggggcccgcgggcgcgcccgggtagtcaaagtcgccgccgccgccgccgcccgtggggcccacggccgccttggccttctcctgctgccggctgtgctggaacaggtcggccaggaactcgtcgttgaaggcggccgggtcgatgtaggcgctgatgtcgatggacgtctcgtgctcgcagatgccgcccagcggctccggggcggcaggtggggcgggaggctgcgcggggcccgcgccccggggaaagccgaaggcggcgctgctgggcgcgtgcggggggctctgcaggtggctgctcatcgggggccgcggctccgcctcgtagaagtcggccgactccatgggggagttagagttctcccggcatggcgagcctcggcggcctccagcctgcgcggggcgtcgccgccgcccacccggagaccctgctcgcccgcgcccgcgcacctccgggtcgcgaatggcccggcccgcgccggcccagcttttatacccggcaggccgcgtcgccccctagagtccgaggcggcctctgtccccgggctgcggcggcgcggcgcctgctgggtcctagcgcgcggccggcatggggcggcgaaccagcgcggcacagcgccgcgctccccaggcaggccgcggcgcaacgcccaccgcctccagcgcgcccagcagagccgcggcgctcgctccaagctccgcccccggcccggccgtcgcccccgcgcccacgtggtcggtagcgggggccccctcctcctgcctgccctaggcgcccgtatccagccacggccgggagcccaggagtatcccgaggctgcacggggtaggggtggggggcggagggcgagtcttggtcttgagctgctggggcgcggattctctttcaaagccagaaccaggcctgtcccggacccgcgtcccggggaggctgcagcgcagagcagcggggctggggccggtggggggccgtttgggacgcgcggagaggtcctgagcgcggtggctctgcgtctcctagctctgatctccaggctacccctgtgattccgcgcagaggtacctctcggaggacgccggggtcccatgggcggcgccgcgcagggcgctaggaccccgcggggagcggaggcggcctcggcccgggagcctggaggacctggccggtcgatccgcccgggctggaaaactttctttataattacttctccaggtcggagcgcgcggcttgctaggcgcgcggggccggcgctgttacccggcgtggagtcgccgattttttttcctgcgggaccgcggggccccccagactagcggagctggacgccggggcgagcacggggaggggcgcaccgagggaggagacaaacttaactctggggccgggattccgaggcgggggccgcagccctcgaggcccgaagccaccgcttcctcccccgcctccccattcaggtgggcgccaacggcgggagcgagggtgtccaggccgccgggctgccaggtccgagcacgcacagggagaactctgcccagtggttcgccgggcgctgtagtccccgggatcctagggaccgaggcggccaggccctggggccccttgagtgcggcagctaatgctctcaccgcggcgggggaaggagcttgccaccgagacccccagccacgtgcgtccctcgcattctttaccggggccggggtggcggctacggaccgtcagctgggcccagatggagtcttgggagccctcaagtgtctcctgtccttgcccgcgccgcccctcgccactggcgctgaggcctgacgccgcctgcgtcccggctagaggcgcgcttgcctacaggtgagggaagacccccttcaccgacagtggccttaggcctggcaaggcgccacgacccgcccaggagccccggagggggcacagctaaaaacaccgctggagagccccgagcttccacgacgatcgcagtaaagaagcagtttcatctgggcaacgcacactgcgctttaatcaagttcctattcaacatagtcccagtgattaatagcccaactgcttcgttttcggtccagagctcataaacaagatatttttagcttgacgcttttggacgggagggagtaaaaaccagatacgttaaataaatatcccgatgtgagccggagagctgcttgctgagccaaatgcaggacccattcatatagcattcacctgtggagggagacctggacggaaatcaaaaagcaccaagagcgatttgcgtttttttctgcggtgctaaaactaatggcttttcctacctaggaacaaagaaacgccactgtacatgcacggttcccggcctgtggagttgtgggaggaaggcgatgtctggccttttttgcacagctgctgttgcctgcccagagatcgggaactctgccccgtaggactggaagaaacctcagtaatgggaataagactttgtccaatagggggctgatgaatgtgtgggggcgacaatggcaaggagtgggactcccggcccggggttcgccaaccccaggggccacaggtcctcctacaattgaaccagaattcacccacccgggcctgccctgtgcagggtgccgagagcccagggatgcatgagagggtggctcctgcctctgggaactgggacagtgggagagacggataagttgtcacacagaggctgctgggaggaaggaggagacagaaggagtaggggatgggacttcattcattcatcaaatgcacacgaggcacaaatgggaatcaagggtggatgtgctgtgatgaagagaagtcctgccctgaacaaggtggcgctgtggaggaggcagagatcagatttgtctgcggaggtgttatggactgaactgtgtccctgccccaaattcctatgttgaaggcctaacccccatgtgactgtatttggagataaggcttttaggaagtcattaaagtgagatgatgtcatatgggtagggtcctaatttgataggattggtggccttatcagaagaacaatgtcatgggcatgcacagaaaggaggtggccgtctgcaagcagggaagaggcccctcaccagaacctgagggtgctggcagcttggctttggccttgggcatccagcctccagaaccatgagaaataaatgtttatggtaggtctatgatggcagcctgcttggactgaaccggcggtgagacagggcttcatgcaggagcagacctttgagctgggccttgaaagttgagcaggaatttgctggaaggataagggaggaaggctcttctaggaggagggaatggtaagtgcaaaggtggagagcctgccagtgcatgtgttctggtaacaaagaacgagatggttggccggctggagagtggggtgagggagggtggggcctagataaggctggatccgcagacagggctgggctgatggccaaggccactgcaggtgaagggggaacccttatctcccaggcttttgacctccagattttagcaggggagcttcgttgtcggatttgggttcctgagaatctactctggccaagacggagagggggtgttgaccagatgggaaaggatggagacttgtattgccccagtaatgagcgggcagggtagattagaacaagatgtcaggacttgggggctgaatgccaggcttctggctgggattaccaccccctgacacatataatgcccaggaaattggaggcccctctccaagcccccaggaggccactggggactcattccaggatactcacctgcctgctttgtggttttggaggggaagaccttggagcagttgcgaagatccatctaccatgttctggtttttccttggaagcctaaaagtgtacctcgggatgaggaggaaatggttttgagggcaagtggtaggtctctggctaggcctggcggggttctcagaggacagggggtgtctagggccctagatagaagtgtcctgcccaagccctaaagcaggaaattagctggggagttggggtgagaccctggggtcgatggaggcactttccatgggagagtcccacagggtaagggagagggggctgatgtctgacagtctcatagacagttggcttgtggctggagaagtgggagcaaaggagaaatcacctttgattgggagaagtggctctggctcatgtgcaactgagacaaagccagtcctaagagcagcttgtaaattcttctgtgaccacctttaaggtccttcttcctgaggctgtggatgggggtgtacacaggcccagtgtggggggttgagcgtgagtccccgggaaacggtggtcctgagttttggatgctccaggatgaagcctgattctggagtcaatcacagcactaaccattttgagaagacaaacagagccctagaaatgttttattttactttggtttaaccttcctaatgcaaggcccacgagagaattagtacgtaagtttggaaatcaatcaaattctgaagagcaaaaacggaactaacccttctgatgtagttttctgactttatctgaagctgaaatgtgtgtgtaagattggtcgctccaaacaggaccaattcagataagataaaagtccagaactatgatttcaggctcagctgagctctggctaggggtacaagtatctaatatggtatagctaataatgtctcaatcattcaataagatactctcaaaggccttcctccaactagacaaacaaaacaaaataaaaacactagttactttttgttacaaatggattcataaacggttttatactgattcattttaggctttagatcttgacatgtaaagcatatgaactcaacgcataatcaacccaaagtccagtgtttctttttctttcttcttttttttttcgagacagggtctcactctgttgcccaggctggagagcagtggttggatctcagctcaatgcaacctccgcctcccaggctcaagtgatcctcccacatcggcctcctgggtagctgggactacaggcatgcaccaccatgcctggctaattttttgtatagatggggtttcaccacgcagcccaggctggtctcgaactcctgagctcaagtgatcctcccacctcggctttccaaagtgctgggatttacaggtgtaagccactgtgtccggcctagtgttttttatccacaggcgcccagctctacccatgagattacttatcctgtctccccaggaggcaggtggtgtagggagctgctgggaggattagggagaatgttgtgccaaggccagttcctggcatgcaggacacacttgctcagtaaataagagcttggcatacgcttccctactctccttgtctctccataagtgcacttttgaggttctagtttcccccaaaactttgaatattaagcaactcatttctttttttctttttcttttcttttcccttccttccttccttccttccctccctcccttctttcttttctttctctctctctctctctttctttctttcttttctttctttctttccttccttccttccttccttcttttttttctttctgacatggggtcttgctgtgtcacccaggctacagtacagtcatgcaatctcagatcactgcaacctctgtctcccaggttcaagcgattctccaacctcagcctctggagtagctgggactacaggcatgcaccaccatgctcggctaacttttgtatttttcgtagagacagggtttcaccatgttggccaggctggtctcaaactcctgacctcaggtgatctgcctgcctcggcctcccaaaatgctgggattacaggtgtgagccaccacaccaggcctaagcaactcatttcaacacatagttatggaatattctggcagtgtattaggctgaggttctctgtgtgttctgcggaaaagtacctagaaggcatggtactctatgcagaacgttccaaggcataacaaattctgtcttcataaggtagagatcatttaaccattaggaagtgtaactatattgtatgtataccacataaaatcacaaccataagtactcaagtctataacgagtccatactgtcaaattcacaaaaatcagctgtttccagttttctctctctctctctctgtcctgtctttttttatttttttttgagatggactcttcctctgtcacccaggctggagtgcagtggcatgatctcggctcactgcaacctctgcctccccggttcaagcaattctcctgcctcagcctttcaagtagctgagattacaggtgagtgccaccatgcctggctaatttttgtatttttagtagagacggggtttcaccatgttggccaggctggtcttgaactcctgacctcaggtgattcaccagcctcagcctcccaaagtgctgggattacaggcgtgagccaccgtgcccaacctccagttttttcttaatattcatctactataccatgtgtgtgatttcttttgtcatttttcatgtttataatatagttaggctttgtgtccctgcccaaatgtcatcttgaattataatccctgtattccccacaatccccatgtgtcaagggagagaccaggtagaggtaattgattcatgggggcagtttccccccaacgttgttctcatgatagtgagttctcatgagatctcatggtttcataaggggctcttccctcttctctcggcacttctccttcctgccgccttgtgaagaaggtgcctttcttccccttcatcttctgccatgattgtaagtttcctgaggcctccccagccatgctgaactgtgagtcaattaaacctcttttcttaaattacccagtctcaggcagttctttacagcagtatgagaaaggactaatacagtttgttgattttatttgcttgcaactgctagcaggtaagcagtagctggcaccaaacattctagaaaaagaaaattgagtcaaaatttaaaaatcagggctgggcacactagttcatgcctgtaatggcagcactttgggaggccaaagtgggaggatgtctggaggccaggaatttgagaccagcccgagcaacatagtgagaccccgtctataaaaaaaatgaaaaaaattagcgggcatggtgatgtgagcctgtagtcccagctactcgggaggctgaggcaggagaattgcttgaaccttggcgtttgaggctgaggtgagctatgatggcaccactgcactccatcctgggtgataaagcaagatcctgtctctaagaaaataattaaaaaaaaaataaacattcagaaaattctatctagtaattttgttgagcaaattgggaaaagcccttcattctattttggtggaaaacttctttggtaaatgatgggtccccaaactctgcatctagcatttggggagcactgcagaaggcaagcattggatgtggcaggtcgcccatgcttctgtgagatccgagacaagagtacaaatggcagcccccatagcatctgtttaaatatgaaaagttaccaatcaaactgagaaaccgttagagaaaatatgttctaccttcttgtcttaacacatacatctttatcatgtcctagaagaccggatagaatctggtttgggaacatggtggtgtggggatacccagccataccaattctcttcccatcccatcctctattccattccccgccagaaaggtcctgagtcaggggtgtggattcccaacacagggcacaaatgccgcctgtgccccttgaaaaatgccacaccttcttccttcccacatcctggggcttgggggcctggtgaagaggaccacgcaggtccaggcagctggccctgggctgctagggcaggaaactccttcgcccgtgggcaggagcagccagagcgggactagcgggcgccctctcctgtgagggtccagcacaggggccctcctgcctgagtctaagggtgggactaggccggcactcacagggcaagcaggagagcagggaccccactggtcctcgccttgtctgggggcccctggccctgcttctgtaggaggacacgacagttggcaataattccacacctgtgtccccagttcttcccttccctccacctcaccattcacatcctgcttcttcccttccctccacctcaccatgcacatcctgcttccagccccggggctttctcacctggaccactgcaccagcctctgactggcctccctgtggctttccctgctgccatgccccccactctctccacaaagtagcccgagttatcccttaaacatgcactcagcctgtaatcccagtgctttgggaggctgaggtaggaggatcactcggggccacgagttggagaccagccttggcaacatagcaagacctccctctctacaaaaaaaagtttttttaaaaaaacaaagtgaaacatgcactcagatcacaccactcaccaacttaaaccctcctgtcaccacccattgcgcatgggagaaaacccgtgtacatccagctggccacagaccctgcctaaattggcactcgtctctgctcatgccccatccgctccttgactccctagctggctttgccaagcagagcgtctcccagccgcaaggtgctgcgctttgcacttttggttccctggaatgctcttcccaggttggcacgactccttccttcctgtcatttgagaaggggctctcaggttcctcgcagggacctgctgcacactcgtcacccctcccccattgttccgtaggccactgtgtgttttattttcctcatagcaccctctaaaaatggtattttatgtgttccttatcagcttctccccactagagtgccaactccacaaacgcaggaaccttgtctgtcctgttctgcccattcccagagctagggccagcctcagcctatgcgagagcctcaaatatttgttgaacgaacacagatggatttgactgcagaaaactgctaccccgccaccctcctggaactgagtctgttcctaagcctagagttgttcaagggtggccctgaaggatgctggagaagacccgactgacccccgggtcagggatcactacatctgactcagtccggagcttcctgaagcagtttcaggcaaggctgccagggcctggaggacctgctcagtgcctttagggtaactccaaagaggccactgacaggcagttatggcccccaggggcttggctaagcaagaagaacctttgtagggaggaaaatggggccttttttcggggtagctgcagtccagccaggacacaaggctttgtgagcagaggtcacctgagttgggccctacctgaagcgccccctccaccatggctccagagctccccctacctgtagggcactgccaggaggggcgcccagggaagcatggacatggctgagtatcagacccacctagggaaatgggcctgtctcccagctggctcataggggccacagggactgctctatcctgccgacttggcaggccccactgctccagagatagggtggagtccttggagcccattcttgtgcacccaccgttctgaccccatttcttctctttgctgaattccaaggatttgtgcctcaagaggcatcttttaaaaaaattttagcttgatgcctcagctcacacctgtaatctcagcactttgggaggccaaggtgagaggatctcttgaggccagagtttgagactagcctgggcaacatagtgaaacttcgtctctacgaaaaattttaaaaattaactaggtggggccaggcgcggtggctcaagcctgtaatcccagcactttggaaggctgaggtgggcagatcacctgaggtcaggagtttgagaccagcctggctaacatggtgaaatcctatctttactaaaaatacaaaaattagccaggtgtggtggcgggcacctgtaatcccagctactcaggaggctgaggcaggagattcgcttgaacccgggaggtggaggttgcagtgagctgagatggcgccactgcactctggcctgggtaacagagtgagacactgtctaaaaaaaaaaaattagccaggtgtgacggtgcatgcctgtagtcccagctactcaggaggctaagacagaggattatctgagcccaggaagtcgcggttacagtgagctatgattgtgccactgcactctaacttgggtgacagagcaagactttgtctctaaaattaaaaaaaaaaaatcctaataaggtgagaagccaaatcttttgaaaaatcaaaataagagtgtctaggggctgactgcatgacagccccagttccagccttttttccttgtgattctactcagctgcctcaagtctaagcccctcaacactgtgtaaagtagccccaaagtgcagacaatgaagctacgggaggaacgagctgcacacagtgggctacttggaacatttccaaaggctgcatctgctctagcacagtagttggaactcgatttttcccaaaggaagctagtatcaggtcctgctgtggcctgtggaaacacactgtcaacttacaggttaagaaaccgaattttagagtgtaaattagttcaaccgttgaactaatggttcacattgaaagcagtgtggcaattcctcaaagagttaaaagcagaactaccatttggaccagcaatcccgttactaagtatatacccagaggaattaaagcattctatcataaagacacatgcatgcgaatgttcactgcagcactattcacaatagcaaagacatggaatcaacctaaatgcccatcaatgacaggctggataaacaaaatgtggtacgtatataccgtggaatactatgcagccatgaaaaagaatgagattctgtcttttacaggggctgttatccttagcaaactaacacaaggacagaaaaccatgttctcacttataaatgggagctaaatgatgagaactcatgagcacaaagaagggaacatcagaaactggggtttacttgaaggtggggggtgggaggagggagaggaacagaaaatataagctttgggtactgggcttaataccgggtgatgaaatatctggacaccaaacccctgtgacacgagtttacctatgtaacaaaccacatgtacccctgaactgaaaataaaagattaaaaaaaaaaaaaaaagaaaccgaattgcaaaggttaccattcttgacatccaagataaaaccttaactgaaacaaagcaagctgcagaatagcttgcagcttccacttttctggggggaaaaataaacctctttaaatatacatttgttaggtgtatagaaagaagttaggaggacttcacatcaaactgttaatggtgggttctcactttgtgggaagggggataatttgcactttttaatttatatactcttgtattttggactttttaaagagatgagtatatatttattaattttatagtttttaaattataaaaatatgttgtcacttcaattttatagttttataaactgtaaattgttttaagtcacttgaatttactctacaaattatataatgctataatggatgacatatttttataataacttcaaaatgcttttcagtgaccgtattttccaaataaaaaaatctggaggctggcgtagtggctcacgcctgtaatcccaacactttgggaggccaagatgggtggatcatgaggtcaggagttcaagaccagcctggccaagatggtgaaaccccgtctctactaaaaatacaaaaaaaattagctgggtatgggcgcacgtgcttgtaatcccatctactcgggaggctgagtcaggagaatcacttgaacccggagggtggaggttgcaatgagctgagatcatgccactgcactccagcctgggtgacagagtgagactccatctcaaaaaaacaaaacaaaacaaaacaaacaaaaatctggaaacatgctctaaaatagattttttaaaaactgatttgtggattttctcatatgaagaatcatatgcagttatagataataagtcacatttaattctacatttaacaagtcatctttattttaaaagaaaaaagctcatttatttatatataaagaacttctggccaggcgcagtggctcacatttgtaatcccagcactttgggaggccgagtctggcagatcacttgaggtcaggagttcgaggccagcctggccaacatggcgaaaccctgtctctaccaataatacaaaaattggccaggtgtggtggcacgcacctgtaatcccagctacttgggaggctgaggcatgagaatcgcttgaatcttggaggcggaggttgcagtgagccaagatcatgccactgcactgcagcctgggcaacagagcaagactctgtctcaaaacaacaacaacagcaacaaaaagaccttctaaaaatcagtatgaaaaggaattacaatccaaaagaaaactgaaatatagagagagtttattttaaaaagtaaacacaggccaggtgtcggggctcacacctgtaatcccaggactttgggatgccaaggtaggaggattgcttgaggctaggagttcaagaccagcccgggcaacatagtgagaccttgtctctactaaaaataaaagcttagccaggcatggtgttgcatccctgtaatcccagctacttgggaggctgaggaaagaggatcccttgaactcaggagttcaagactgcagtgagctatgattgtgccactgtactccagcctgggtgacaaagtgagactctgtctatcaaaacaagggaaatgcaaatagattttaaacatgcttaaaaatgctaattctctgaaaatgatatacaaattgatatacaaaatgatatactaaatgatatacaaactacaccattggacaggtgaagttgaaaacgtataataatatgctggactggtcaatgaatagagcaaataggtagaattctatattgatacaacctctttggaggataatttagcaatacttacctaattttaaagtgtcattttcctttcaacttgcaattccacttatagaaattgaatcccataaagtcttatgtatacacaaaggggtgcatgttggatattaactggggtacaagggatattgactgcaacattgtttttgtttgtttgtttgagatggggtcttgcactgttgctcaggctggagtgcagcggcatgatctcggctcactgcaacctccgcctcccaggttcaagcaattctcctgcctcagcctcctgagtagctgggattacaggcatctgccaccatgcccggctaatttttgtatttttagagatggggtttcgccatgttggccaggctggtctcaaactcctgaccttaggtgatccacctgccttggcttcccaaagtgctgggattacaggcatgagccaccgcgcccggccaacattgtttataattgtaaaatagaagagtggttaagtgaccatgggctaactggttaataatccctgtgtctgttaaaaaggaggagaaaaaggctgtatgaacacttaaagaaatatctctgggctgggtgtggtggctcatgcctagcatattgggaggccaagagagatcacttgagtccgggaatttgaggccagcttgggcaacatagtgagaccctatctcgacaaaaagattaataagatatatatagccaggcatgctggcatgcgccagtagtaccaggtactcagagctgcggtgggatgattgcttgagcctgggaggtcggggctgcagtgagctatgattgtaccactgcactccacactcctgggtgacagagtgaaaccgtgtctcaaaaactaaaacaaaaaaacctctgatatattcattcatcgttacacagatttgcctacgtggacctggaaatatgctctaaaactggattgtttagtgatttgtgagtttttgcatatgaagaacatacacagttatagacactaaatcacttttttgttgttgttgttagatggagtctcactctgtcgcccaggctggagtgcagtgaagtagccgatctcggctcactgcaacctctgcctcccaggttcaagcgattctcctgcctcagcctcccgagtagctaggattacaggcacacaccaccatgtctggctaatttttgtgtttttagtagagatgggtttcgccatgttgaccaggctggtctcgaactcctgacctcacgtgatccacccacctcggcctcccaaagtgctgggattacaggcatgagcactgcacctggccaacagtaccttatttttattgctggccctgaagaaacctatacagtactcagatacagtaaagtttttcatacaacacgagctcatttctctcaaacatggactggggtttcctgtcgtgttgatttagcagttcggggactgtaggtgcggcaggattgtcccatcccacctctctaattagtctcgtctctaccattttcagtcaaaattccaaaggtcacttggaaggcacatagcccacgaaactgtccagacactcccttttggccaaataaccctccacagcccagattccagtgcagagccctgggaaccaggggcatgctgtttccaatcctcatctgcttagccaacagggagaggtaacaatgaacaaattgagtttcaaccagcatatctttagaacccaatttttgttataattgattagaaaatctagcttacattccaaatgcactctttttttttcttttcttaatcttagtcaaggtgcaataacagttaaacgaaaaccagcatgagtcaggttcctataaaactgtctgctctcagagttcagcatttttctagagcaggaacatttgccggcagtcagcatagaacggggttattctggcctcttacttttctaggggaactcatcataagacaagcagctcacgtggaatctgacactgacatggaatgcacacactgggtggacattgatggagttcttgggtctcactctgttgcccaggctggagtgcagtggtgtgattttggctcactgcaacctttgccttctgggttcaagagactcttatgcctcagccaccccatagctgggattacaggcacccgccaccatgtctggataatttttatatttttaatagagacggggtttcaccatgttggccaggctggtctgaactcccagcctcaagtgatctgcccgcctcagcctcccaaagtgctgggattacaggtgtgagccatgtcgctcggccagggaactcttaagtagaatttgaaaaacagcagcagcaacaacgatacacctagggacattggagtcaaattgataaaactaaataaaaatacaatgttgaacatggtcagaaaaaacaagaccttgcatacaggggtgcaaatattcaaatgaccgtggacttatatcagaaataaatgaggccagaagacagtgaaacaacatcttgaaagcactgggaaaaaaaaccagtcaatccagaattctgtatctagtgaagatatcttttaagaataaaggtgaggctgggtgtggtggctcatgcctgtagtcccagtgctttgggaggctgaggcggtgggggatcacttgacctcaggagtttgagaccagcctggccaacatggtgaaaccccatctctattaaaaatacaaaaattagctgggtgtagtggcgcgcgcctgtaatcccagcttcttgggaggttgaggcacaagaattgcttgaaccaggaaagcagaggttgcagtgagctgagattgtgccattgcactccagcctgggtgatagagcgagaccctgttgcaaaaaaaaaaaaaaaaaaaaaaaagaataaaggataaaggtgaggctgggtgtggtggcttacgcctgtagtcccagcactttgggaggctgaggctggaggatcaactgaggtcaggagtttgagatcagccaggggaaaaaggtgaaaccctgtctctacaaaaaaatacaaaaattagccaggtgtggcggtgtgtgcctgcagtcccagctgctcaggaggcttaggtgggaggattgtttgagcctggaaggcagaatatgaagtgaatcaagatcatcctgccactgcactccagcctgggtgacagtgcgagaccctgtctcaaaaaaaaaaaaagaaaaaaaaaagaaaagaaaaagaaaaaagaataaaggtgaaataacgtggacataaagatgggaacgatagacactggggactactggggggagaggaaagggggtgtgggctgaaaaactacccgttgggtactgtgctcactacctgggtgatgggatcatccgaaccccaaacctcagcatcacacaatgcacccacatgacaaacctgcacacgtaccctccaaatccaaagtaaaactatatatatatatataaaaaggtgaaataaaaatgtttttagtttttaaaaaaactaggggaatttgttagcagcaaacctgagctacaaggaatgctaagggtactttaggaggccaaggtggaaggatcgtttgaggccaggagttcaagaccagcctgggcaacatagtgagatcccatctctgttgaaaaaaatgctaaaggaagagttctgcaggctgaagggaaatgaaaccagatggaaacctggatctacaggacagaatgaagctcgtcagaaatggtaaatatgtggataagtagaaaagattacttttgtcctcttaatttctttaaaacagataattgtttaaagcaaaaattatattgtgttatggggtttataatttctgtaggtgtagtaattatgacaactataacataaataacagggggtgtacatgagcctatatagttgcaagctttctgcattttatgcaaagtggtgcaatataaacttttggcaggctataaaaagttaagggtgtatattctaaccctagggcagtaacttaaaaataagccaaaaaggtgtagctgtaaagcaatggacaggttaaaatggaattcaaaaatatattcaggtaatcaaaaggaaggaagagaaacagaattaaaaaatagaagacaaacaaaacagtaaaattacaggcttaaatctaattatatcaataattatattaaataagaaggaatagcattgtagttaaaaggcagagattgtcagaatagataaaaatgtttgggaggccgaggcaggtggatcacaaggtcaggagtttgagaccaccctggtcaacatgatgaaaccctgtctctactagaaacacaaaaattagcctggcgtggtggtgcgtgcctgtagtcccagctacttgggaggctgaggcaggagaattgcttaaacctgggagatggaggttgcagtgagctgagatcatgccactgcactccagcctgggtgacagagcaagactccatctcaaaaaaaaaaaaaaaaaaaaaaaaattccaaggcccaattatatgctgtctataagcaacctgccttttttttttcttttttttctttttttttttttcttttaagacagggtttcgttctgtcacccaggctggagtgcagtgacaccaacacagtttactgcagtctccacctcccaggccctcatttctcaatctcctaagtagctgggaccacaggcatgcaccaccatgtctggctaacttttgtatttttttttagagacagggtctccctttgttgaccaggctggtctcaaactcctgggctcaagtgatttgcctgccttggcctcccaaagtgttgggattagaggtgtgagccaccgtgcctggcctataagcaacctactttaaatataaagacacaaatgggttgaaaattgataggaaaagatatatcatgtaaaccttaagcataagaaggcttaattggctttacaaacattaatagttttcaagacaaacaatattaccagaaaaaggaatcttttataatgataaaaggtcaatacattatgaagttgtgatcattgtaaatgtgtatatacctaataacagagccccaaaacacataaagtaaaaatggacagaaaaaaagggtgtgactggaggttgagggtggaagacttttttttaaatttcaattttatacttcatatggtttaaattttaacaccaaatgtgtattctgccatcatcatcatcatcatcaaaagagtgaaaataatatttgagccaagtcttaaaagatgactaagaatttttcagaaaggtggtaagggagggcattccaggcaaaggtcatatgtgtgccagcacagggaggcatgaaattgcctgatgtgttctggtcctgcagttttttggcaagtctgaaatataggattgggttggtattactgaggaggaatgggagatgagcaacagacaagtagaagccagatgtggaaggggcttatcagtgtgctcatttgaactttatcttgacagtcatggatagtcactaatgtgtttttcaaagggaggatacaggattttctctgggctttagagagacaattctgactgcagcttagagaatggtttagaggagaccagagtgaaggcagagtaacttctgggagatgctgtagtaatgcagattagaaatgctgggggcctaaaccaggaaagtagagcagagatggagaaaaaacaagtgtggttttgaaaggtatgtagggaccaggcacagtggctcatgcctgtaactccagcactttgggaggccaagccaagtggatcacctgaggtcaggagtttgagaccagcccagccaacatggtgaaactccgcctctactaaaaatacaaaaattagccagacatggtggtgcatgcctgtaatcccagccactcaggaggctgaggcaggagaatcatcacttgaacctcaagaggcagaggttgcagtcagccgagatcatgcctttgcactccagcctgggtgacaagagtgaaactccatctcaaaaaaaaaaaaaaaaaaaggaaagaaagaaaaataaaggtacatagtaagcaaaataatgagaattttgcaattctggatctaagtgatgagagacattgacatctattaactcctgcaagtttagtctcatgaaaccacttagtgacacgatactttattcccatttccataaaacaatattgacataatgatatctaccatttaaaaagtttattttattcaatgcaatccctataagaatctcaactggtttctttatgtaatagaaatggacacactgctgatcctaaaattcatgtgaaaatcaagggacttaaaatagccaacataatcttgaatagaagaaaaatgtttggaggacttaaacttcctgattccaaaacttactacaaagcaaaggtattcaagacagtgtggtactggcatgaggttagacatatagatcaatggaaaagaattgagagtccagaaataaatccatatattaatggtaaattgatttttcaacaagggtgccaaaagcattcagtggcagaaaaaaatagtctcttcaatatatggtgctgggacaactggatatctatatgtgaaagaatgaagctggacccctacctcacaccatatacaaaaattaattcaaaatggatcaaagacctaaatgtaagagcaaaaactatgagattcttagaagaaaacaaataagtaattctttatgaccttggttaggcaaaatggtttctcagatatgacacccaaagcataagcaacaaaataaatatagataaattggacttcatcaaaattaaaaatttgtatgcttcaaatgacactaataagaaagttggctaggcttggtggcccatgctgtagtcccagcactttgggggggctgaggtggaaggactgcttgaggctgagagtttgagaccagcctggacaacatagcaagaccctgtctctcaaaaaaaaaaaaattagccaggtgtgtggtgcatacctatagtcccaactaccctggagctaatgtgggagaatcacttgagcctaggagtttgaagctgcagggagccatgattgtgccactgcactccagcatgggtgacagagggagatgctgtctcaaaaacaaaaaacaaaacaaaacaaacaagaaagtgaaacgactaaacaatggcagaaaatacgtgcaaattgtacctctaataagggacttatatctagaatacataaagaactcttacaacccaagaataaaattatcccaattaaaaagtggacaaaggccgggcgcggtggctcacgcttgtaatcccagcactttgggaggccgaggcgggtggatcacgaggtcaggagatcgagaccacggtgaaaccccgtctctactaaaaataaaaaaaaattagccgggcgtggtggcaggcgcctgtagtcccagctactcggagaggctgaggcaggagaatggcgtgaacccgggaggcggagcttgcagtgagccgaggctgcgccactgtactccagcctggggtgacacagcgagactccgtctcaaaaaaaaaaaaaaaaaaaaaaaaaagtggacaaaggatttgaataaacatttctccaaaaaagttctacacctggccaataagcacatgaaagggcgctcaacatcattattcctcaaggaaatgcaagtaaaaacacaatgggctactcacttcacagccactaggaagcctgtaataaaaaagacggctagtaagtgttagcgtggggagactgataccctcataccctgctggtggggatgtaaaatggtgtggccacttaggaaagcactctggcaatttctcaaaaagagctgccatttgacccagcaattccatgcctaggtatataggcaagagaaatgaaaatatgttgtattagtctgttttcatgctgctgataaagacatacctgagactgggtaatttataaagaaaagaagaggtttaatggactcacagttctacgtggctggggaggcttcataatcatgacagaaggcaaaaggcatgtcttacatgctggcagggaagagagggctcttgcagggaaactctcctctataaaaccatcagatcgcgtgagacttactcattatcacgagaacagcacgggaaagacctgcatccatgattcagttatctcctgagtccctcccacaacacgtgggaatcatgggacctacaattcaagatgtgatttgggtggggacacagtcaaaccatatcatatgtccacacacaatctcatacatgaatacttatagtagtattattaataacaggtaaaaggtggaaccaatctaaatgctcacccactgctgaaaggataaacaaaatgtggtatatccacatgatggaatattacttagctgtgaaaaggaataacatgctgatatgtgctaccacacagatggaccttgaacatattatgcaaagtggcagagacagttacaaaagatgacacagtctatgagtccatttatatgaagtgtcctgaacatgcaaatctatggagacatagaggagattaatggctgcctagggctgtgaggagggggtgattgggggtggcacatgatagctaaaggggacacagctggtttggagagtgaagaaaatgttctaaaattgtactgatagttgcacaactctgtgaatatacaaaaaaatcattaaattgtacacttaaaatgggtgaattgtatggtgtgggaattatatctcagtaaagaagttaccaataacattacaaaacaagaaaaagagtttattttattttattgagaggtggggcttcaccctgtcactcaggctggagtgcaatggcaccttcttagttcactgcaacctcgaactcctaagctgcctcaaactcctggcctcaagcgagcctcccacctcagcttcctgagaagctgggactacaggcatgtaccaccatgcccagctattaaaaaaattttttttttgtagatggagtcttgctttgttgcccgcgctggtctcaaactcctggccacaagcaattctcctgccttggcctcccaaagtgctaagatcacaggtgggagccagtgggcccagcccttttaatttttaatttttaagttgtacagatgatatatgtgtattttatttttaagaaaatcaaagtatagcaaggcgtagaggaaaacattttaaattacccccttatcccaaattttgaatcctaccgcagttctaagaggaagccactgtcatcagtttaatgcaaatctttcttcacctttttttgtgatgtataggtatgaacgtaaataagaagatgtagatacatcatttagttttctgactttaaaaataaaagggttcgtgtggtatgtattgctctgctgcttgctttttcacttaacattgtgttttggagatccctctgtgttattacatagagatcttcctttgctttaaaaaatactgcatggtataatattatatagcaaagatgtgtgtaggcttaatacttagtagtgaaattgttgggtcaaagggtgtggggtttaaaatttaacagaggccgggagcagtggctcacacctgtaatcccagcactttgagaggccaaggtggaaggatcacttaaagccaggagttggaaaccagcctgggcaacatagtaagaccctacgtctaaaaacttggctgggtgtggtggcacacacctgtggtcccagctgctttggaggctgaggtgggaggattgcttgagcccgagagttcaaagctgcagtgagctatgatcacaccactgcactcctggaggggtgacagagcaagaccctgtctcttaaaaaaaaaaaaaaaagaaaagaaaaataaaatgtaacagatactacacattgttttttagaaaggctacacagtttcacacactcaccagcagtaaatacatacatctttcaataacattttgtaatatcaaataatggatattaatacttttaaattttgtttgtttgatagctcattgttgctttaacttctattttcctgattacttataaggttaatgaatatgaaattccctaatgttttcactctgagttatttttcttaggctgtctggtgtattttttacatctttttatttcaagggctttatttttagtttgttttacccatagctcttgtaaacagcaagtagctgattttcttggttgaagttcttataaatttacctgatctggcagctgaaaaaaagggaacttgcaaaatttaacagtttgttaatgacaaatcactaaaattgtttaaaagttgtctatttggccatgtattgtcttagtttagcatattatcatgtgctgtagaattaaagtttatttatatagtacattttacgtttttgtttgtttgtttgttttgagacagtcttgctctgtcgcccaggctggagtgcagcggcacagtctcagatcactgcaacctctgcctcccgggctcaagcaattcctgtgcttcagcctcctgagaagctgggattacaggtgtgcactaccatgcctggataattttttgtatttttagtagagatggggtttcaccattttggctaggttggtcttgaactcctgacctcaagtgatccgccccccttggcctctccaaacgctgggattgcaggtgtgagccactgcgcccagcccattttaagtttgaccaaaaagaattccacttggtcattatgatgattttaaaacatgtccacaaattgtttgccacttctctcactaaacgtggagtctaattcccctgccctcgaatgtgagctggccttagtgacgcacttctaacaagcagaatgtagctctggtgctgtgttcccttccagcttccagctggctcttttcctattgaaatccatgtccttggaacctagccaccatgttgtgaggaagcccaagccacgtggagaggaaaggaggctcccagccaacagccagtatcaactgccagacacataaatgaaccagccctgggatgactgcaactcccagcttataagtcttccaaccaaggccccaaacaccctaaagcaaaaacaggccatcttcgttgtaccctgcccaaattacctatccatagaatccgtgagcaaaataaatggttgatgccattaaattttggggtaatttattatgcggccacagtaactagcatatttattgataaagagagttagccaggcatggtggctcacacttataaccccaatgcttttggaggctgaggtgggagaatcacctgaggccaaatatgtaagaccagcccgggcaacatagtgagatcctctcttaaaaaaaaaaaaaatagctgagtgtggtgggacatgcctgtggtccagcccaggaggacaagttgcagtgagctatggttgtgccactgcactccagcctgggcaacagagagagacagaatctctctctttaaaaaaagagagacagttttagaggtgtttctcaacaccttccaggtggggtgaaaaaaagaagacaatcttgcctagaaatgtaattatgttattctagtaaatcacttctccactgtcctcggtgagatatgtttgaaactgtttataccatcttattttaggtttcctatttttatttctaaatagaaatatttttctttttttgtctttcttttttcattaaaaaaaatcgtttccttcattgaagaataggattttctttcttccattctttttccctctgggaattaggatatatagaatttatgcatcttttattcttctaggattacaatcttttttttttttttttttttttttttgagatggagtttcactcttgttgtctaggctggagtgcaatggtgtgatctcggctcactggaatctccacctcttaggttcaagcaattctcctgcctcaccctcccaagtagctgggattacaggcatgcaccatcacgcccggctaattttgtatttttagtagagacgaggtttcaccatgttgaccatgctggtctcaaactcctgatctcaggtgatccacccaccttggcctcccaaagtgctcggattacaggcgtgagccaccgtgcccagcctacagtcacatttttaaaagatattttttctaccaatatttagtggtgcccagtatctttcctgtcctgaacaagacaaagaacttagtaggatttcacgcctctccttcttctctgcccctccatctctcatgtttacgtcatctgaacttgagttttagactacctttaaaaaaaaagcaattatttatctttaattataagttcatgtccccaccccattttttttttttttgcttgtcactgtttttagtatcacttatctttctcatggattcattttctgacttgttggaatttgtcttataataaaattttcagggaattctttgagggtaaattttatgagtctttagatgactgaaaatgtctttattttgtgctttccatttttttttttttttttttttttgagacagaatcttgctctgttgcccaggctggagtgcagtggcgcgatctcggctcactgcaagctccacctcctgggttcacaccatcctcctgcctcagcctcccgagtactggggactacaggcacccgccaccacgcctggctaattttttttgtgtgtttttagtagacacagggtttcaccatgttagccaggatggtctcgatctcctgacctcatgatctgcccacatcggcctcccaaagtgctgggattataggcgtgagccaccgcgcccggcctgtgctttccatttgaatgatggtttgacttggtgtagagctctgggtttaaaaattgtatttcttttcttttctttttttttttttttttgagagagagtcatgctctgtcacccaagctggagtgcagtggcatgatctcgactcactgcaacctctgcctcccaggttcaagcaattctcatgcctaggcctcctgagtagctggaattacaaatgtgcaccaccacacacagctaaatttttgtatttttagtagagacggggtttcaccatgttggccaggctggtctcaaactcctgacctcaagcgatcagcccacctcagcctcccaatgcctgttgggattacagggatgagccaccgcacccggcttaaaaatggtatttatttcagaactatctatagtgtgttctatcatctcagcacccagtgttgccagtgacagacatgatgctaatatgattgtcattcttctgtgggggcctgatttcccatctctgtttggcaggattttctctttctcatgctgaaatttcatgagatgaacttcctcttcattcttctcccttcatcagtcttcacccatcttctcttttgttccttctattgtaacaagggaggtgaccctccttctgcccccagtcaagccctgttctcatgctctggacgcattttctttcacgttctcaggggtgccaccccacctgcattgaactatgctctagggtcccccacttaagaaaacaaaacgcctctctctgactacgcacctttccacccatctccctatttctttctttcttttttttttttgagacagagtctagctcttctcccaggctggagtgcagtggtacaatcacagcttacggcagccttgacctccggggctcaagccatactctcacggcagcctcctgggtagctgggaccacaggtgtgcaccactgcgcccggctaattttttttttttaattatttgtagagacagggtctagctatgttgcccagggctgctcttgaactcctggcctcaacgatcttcctgccttggtttcccaaagtgctggggttacaggcgtgagccaccacacctggcccttacttcttgactcttcactcataactaaacttcctgacagagttctctgtaaacactatctctgcctattcacctttcattgatttcccaatgcggtttcatctgctccctacactttactgaggttgttgttggaaaggcgccctccctgttttaaggcccagcagtggcccctcccctggtcctcagcagcgtgctgcagcctcccgttggtgaagtgcttcctctcttgctgtctacctgctgcttccagtctccggcgtcagctcctcctctcccaggggcagcctcacttgtctcctctatctgcactgttcttctggggactctaatcctctctaagggcaccttgttgatcgccttgttgtttagtaccaaattcatgtcttcagcccagaggccaagcctgagcatcaccctctaacatctgatctctctatctgtctatttcacaggtatctcggaattaacaagtctaagatgaaatcttggtttccctgtgaacttacctcctgcccctaatctgccccttctttccagctacttaagccagaatttgaggagccaatctctacctctccttcttccccaccgttccatgcctaatctcttataatctattctctcctctttggctcaaaatagacctatcaacttcttatccccgctgccaataccctagtacaaaccactgctgtctcccacctggaccacaacgatgggctaaccctaactgggctccatgcctgccttcctgttcccttaccatacattctccaaccagaggcactgttgcaaaaacataatccagtgcataacttccctttgcgcttaaaataaaccctacaaggcccagcatgatccagcccctgcttctctctctccagcaacacctatgtccttctccagccccacccagcttcacaccttcattcatgcaggaacttcggtctttcagtttcagcctctgtgtcagcaaagaccccttccattttgaagagaatcaaccagttgaggagcgggtggatgatagagcaagttgcccacagagacagcaaattggactcattctcccttccagtgacgaaggatatttatttttctgactcaggactaaagggggctgagaggcccatgctgggaaaagtacttgcaatacatatggcagaggaagggttaatatcctacacgcacagacatccttgagaagaaaagcacaaaaaattcaatgggaaaaggagggggaggaatttaataggttttccacaggaagagaaatttaaatagccaataaataagtgaaaagatcagtttcattagtaatcagggaaatgccaattaaagaaactagagcaggtttttaaagaaaaaactcatcagattggcaaaaattaaagagtggctggctggtaagaatacatgaaatcagacactgtaccttgtgggtagaattgcagcaatgctttggggaaataattcggcaatgtcattcagataaaaaaaacatacacgtggccgggcaaggaggctcacgcctataatcccagcactttgggaggctgaggctggtggatcgcttgagcccaggagtttgagaccagtctaggcaacatggcaaaaccttgtccctacaaaaaacacaaaaaattagctggacatggtggcacaggcctgtagtcccagctactcaggagtctgaggtgggaggattgcttgagcctgggaggcagaggttgcagtgagccaagattgcgccactgcactccagcctgagtgacagagtgagacgctgtctccaaaaaaaaaaaaaaaaaaaggaaaaaagttccctttgacccagaaatgacaattcttgagaatctatcttctaaaattaccagcctacaagtatatttacaccaagatggcattttagcactgtttgcaatggcagaagtcagaggagagggtaggaaaagattctaccaaaacagaaaatcactcatgatgtcatgttaagtaagataggaagaaacaaacttctatcactattactccaaatctgtaaacattgactaagtatgtggacaaagggtagagggtgccatgtatctacagaaatattgatttaaacagctcgtggaactgtgggggagttttgtttgaattgtaatattgttttgccaattatgtaaataattttttaaaaaattattttattttattttattttattttatttttatttatttattttttttgagatggagtcttgctctgtcaccgaggctggaatgcagtggtgccatcttggctcactgcaacctccacctcccagattcaagagattctcttgtctcagcctcccaagcagctgggattacaggcgtgtaccaccatgcccggctaatttttgtatttttagtagagatgggatttcgccaggttggtcaggctggtctcaaactcctgacctcaagtgatcaccctgcctcggcctcccaaagtgtgggattacagacgtgtattttaacttttttgagacagttttagtctatcccccagcctggagtacagtgctgcgatcatagctcactgcagccttaaacccgtgggctcaagtgatcctcctgctttagcctcctgagtagctggaccacaagtgtgcgccaccacgcctgccttatttatttatttatttatctacttattggcatatttatttatagaggtggggggtcttgctatgttgaccaggctggtcttgaactctcagcctcaagcaatcctccctcctcggcctcccaaagtgctgggattacatagtgagccactgtgcctggccatgaatggcaaataataaaaaaaaaaacccacaaagaagccataactgagcattcttctgttacttgatggatctgtagagaaattaaactttgctttcaataagacaaactactttcatcagagagatttccaaaaatagtacttcctcactttctggtgaaactattcctcattttgtattgctttatactaatattttttggtttaatattgaactcaaccgctttttcaaagtttttgcaatacagctagtatattttccctactgaagacatcctcttccttctaaaaaaacaattgcttggttggttttgcccattatataattgtaaacagtggacacagatgacccaaactaccccttggagctttagtctttcgtgatggaccaattcctccattcttttaatagctttggttcctctttgcacgctgccagccagaaaactctacatgcttgtggtagaaagctgccctagctaagcacagttttctgggtgtggctctaccgtacttccctcatctgagcagccatggctctcgctggcctttttgggttctctggcactagctggtctgtgaccttctcctgagagggcctcttcagtgtctctatgtgactgtgctaccaccaactacggccacagtctctatcactcatactctctgccacttatagactccactaaatagatctatactttcccaatcacatgtgagcgttaacatgtccaagctcacttactatgatgactgttatcatttttaaaaggagaatgacaagtgttggtgaggatgtagagaaattgaacattcatatattgctggtagaaatgtcaaagggtggccaagcatggtggctcatgcctgtaatcccagcactttgggaggctgaggcgggtagaacacctggggtcaggagttcgagaccaacctggccaatatggggaaaccccctctctactaaaaatacaaaaattagcccggcgtggtgacgtgcacctgtagtcccaggtactcaggaggctgaggcaggagactcgcttgaacctgggaggtggaggttgcagtgagctgagattgtgccactgcactccagcctgggctacagagcaagactccgtctcaaaaaaacagtgaaaagttgcagtcactgcagaaaacaatatggtggttcctccaaacattaacaatagaattcctatatgatccagcaatttcacttctgagtacagacctgaaagaactggaagcagggtctcaacaaggtatttgcacatccgtgttcatagcagcattattctcaatagccaaaaagtagaagcaccccaagggcctatcaatgcatcaatggataaacaaaagatggtacgtccatacaatggaatattattcagccttataaaggaaggaaattctggtgcgtgctacaatatggataaaccttgaggatattatgctaaatgaaataagccagtcgcaaaaagcaaatactgtatattctaagcaaatactatatgaggtacctagggtagtcaaacttatagaaacagaaagcaaaatggtggttgccaggggctggggctggggggagtggagttgttcagtgggtacagtttcagttttgcaagattaaaagagttctggagattggttgcacaacaaatgaatgcatttaatacgactgaaacatacacttaaaattggttaaggtggtgaattttatcttatgcatattttaccaggatttaaactttttcttaaataaaaaaaaaaaggcttggagctgggatccaaaccccatcatctggtggcagtgctaactctgaacagtaggctatgctagtcctgcaggtaagaggacccacacacattagaaggcagttcatgttcccactcctgccagagcgtgcaccctggcggtctcactccccagcccaagcagcttatcaatggattccttatatgtacattcagggcactgcccctccacccaccccacctctgtccagctgggttctggtaaactcatttctgtgtcttcattaattctctcatgactggtgtcttagcagccaccctcaatcacacacaacaaaagcagcacatcctctatcacctataaagctggagcctgggccaagcgtggtggctcacgcctataatcccagcactttgggaggctgaggcaggaggattgctttagcccaggagttcgagaccagcttaggtaacatagtgagaccctcgtcactacaaaaaaatttaaaaaactagccaggtatggtggtatgcacctgtagtctcagctacttgggaggttgaggctggaggatcgcttgagcctgggaggtcaaggccgcagtaagccatgatctgagccactgcatttcagcctgggcaacagagcaagaccttgtctcaaaaaaaaaaaatctggagcctagtgagtggtgaacacacattaattaataatttaataaattattaattaattgttggtaattaataatcaccatctggttattaataagcatttaattaatatgtaataagtaatagcattaaatgaatatagacaaaaattgagaatttaaaattggatgtaagaaataacttcttggtaggtccactttatttcttttattctttttctttttttctttcttttttttttctttaaagcgataagggcttgctctgtcatccaggctggagtgcagtggtacaatcacggctcactgcagccttgaactcttgaagtgatcctcccacctcggcctcctgagtagttgtgactataggcatgcaccaccacacctggctaatttttttgttttttgtagagacagagtcttgctatgttgctcaggatggcctggcctcaagtgatcctcctgccacagccttccaaagtgctgggattatgggcatgagccaccatgcctggcccactccatttcctaataggtgacattgtggcatacactatttgtacatatctatgctatattatgcctttctgaggtcatttattattaaaggaaatttttttttgagacagggtctcactgttgcccagggtggagtacagtggtgaaagcacagctcactgcaacttcaacttcctcaagcaatcctcccacctcagcctctcaagtagctgagactacaggtgcatgccaccacacccagctaatttttgtattttttgtagagatgggggtctcgctacatttcctaggctggtcttgaactcctggccttaagtgatctgcctgctttggcctctcaaagtgctgggattacaggcatgagccacggcacctggcctctgaggttatttaaatctaattctgcttaataacaatttaggaatatgctaaattgcctcttaacgtgttttcccattggttaagtccagaatccatcagggttttataggtcttactgacttacaagcaagaggaactgagtctagttaacttaaaccaaataatctatggaaaaaatatggagaagctcatagaaaccaagaaaaaacctggaacaactgcacaaatgacagtcactagagcaactccaggaatccagatggcaggaacggaccagcatctactatggtgccgctgctgctgagaagaaccagcccagccattttctttgtccctgctgtcatcattggaattcgcaagaggaacatctgatattgctctagcctgcttaaccaaccaatcacagtgactctgttgtggcccggccaggctggctgctcaaagaagaatttgtgccattatcaaaagaatcagtgggtgatgacaaggacgagctgtgtccaccccaaagactcatgagcctttctccttggcagtgccttccaaccaagcatcttctttttttttttttttttttttttttttttttgcccaggcaggagcacaatggtgtgatctcggctcactgcaacctccgcctcccaggttcaagtgattctcctgcctcagcctcccgagtagctgggattacaggcatgcgccactatgtccagctaatttttgtatttctagtagagatggggtttctccctgtttgtcaggctgatcaagaactcccaacctcagatgatctgccccccttcggcctcccaaagtgctgggattacaggcgtgagccactgcacccggccccaacctagcatcttatggacgttacttggcttatatagactcaggtatggctttaattttttaaatgttaagtaatttttaaccagtccctaaaatactgtcaccctccgtgacatcacctctctgtccacacagagaatggacaaggtccaggagagcacaaatctaccccatccattttgaccccaattccagtttatgaaattgataaatacctggactgtctatgcaagacactttcttgtggcaagtcaagttctattttcctattaagttatttacaatattaaggttttgtcctcttcatttttgactgttcttcagtaaatactggccatgactatgggactgtcttatgaattaagtgatgctctgttcaaagactactccatgtgagatcctgtaacactgctgcttcagtaaagctgttttcttctacctttggctcgcccttgaattctttcccgggcaaagcaaagaactttcttgggctaagcccttatctggggctcacctgccctgcatcagtattagcacaaggacagacaaactgaccagtggaaaagcacgtacagatacatacagtcaactgatttatgaccacagccacctgtattgcaatgaggaaagaaaggatgaactcttcagccaggcacagtgatatgcacctgtaatcccagctactcagaaggctgaggcaggaggatcccctgagcccgggagtttgagaccagcctgggcaacagtgagaccccatctcttaaaaaaaaaaagagagagagagagagattatctttgataaatgatggaaataatagtgggtcatgctgccctatcctatgtggatgggcctcatccaatccactgaaggcctgaatagaacaaaaggctgtgtaagaaaaaattctttctctctgtgtggttgtctccaaactgggacatgggtcttctcctgcatggaacttaaaccgtcagctctcctgagtttggacttctcagactctgtaattaggtgagccaattccttgtaattaatctctttataaacacacagacagacacacacattctattggtctgtttttctggatagccctaatatagtatgttatactttgacaaataattttttaactgtttaagaaaatatgtgaataaaaaatctggcctggcatgatggctcatgcctgtaatcccagcagtttgggaggctaaggtgggtggatgaccttaggtcaggagttcaagaccagcctggccaacatggtgaaaccccgtctctactaaaaatacaaaaattagccggatatggtggcatacgcctgtaatcctagctacttgggaggctgaggcaggagaatcacttgaacctgggaggtggagttgcagtgagctgagatcatgccactacattccagcctgggcgacacagcgagactccatctcaaaaaaaaaaaatttctccagtgactaagatctataaaaatatcatcaaatggaaaatctagtgtgaaaagggcaatagccaaaattaagacctcaatagatggagttaacagtcaatgcacattgaagagaggtcactaaactggaaggcaggtggattgaaaagctgaatggagagatgagaaggtcagtgaactggaggataggtccagactgaagtacggtgagaggaagaacatggaaactatagacagtaatttaagaggtatgttaaaaatgtttaatgtcctatcattggggttcccaaaagaggaaagagagaaggaggccgggcatgatggctcatgcctgtagtcccagaactttgggaggccaaggtgggcggatcacttgaggccaggagtttgagaccagcctggccaacctggcgaaaccccatctctactaaaaaaaaaaaaaaatacacacacaaaaaattagttgggcctggtggcacatgcctgtagcctcagctactcgggaggctggcgcatgagaatcacttgaatctggaagtcagagattgtggtgagctgagatcatgccactgcacttcagcatgggtgacagaatgagactctgactcaaaaaaaaaaaaaaaaaagagagcaatagaatgaatcctaagctgcatatatacaaagaaagccatactcaagcacatcctcacaaatacactaaaaatcaaagagaaatcttaaaagtatctagaggaaaaaaaatcacattatcttaaaaatgaacaatataaatgacagctgagtttttgatagaaaggatagaagccaggtgaaaatggaataatgtcttcaatgtgatattaagacataatttttgacttcaagtcaaaaatgactttaataatcaaaagagtaataaaaaaaagagtaaaaaagaagataattgccaacctagaactctatgttcagtgacctatgcttcagaaaggaaggcgaaatgaataaatgtttaagcaaacaactgagagaattatttacttgtatacccacactagaagaaatgctaaaggagttttttgtttttctttttgtttttttgagacagggtcttactctgttgcccaggctggagtgcagtggcgtgatcatggctcacagcagcctcgacctcctctgctcaaaagatcctcccacctcagccttccaagtagctgggactacaggtgtgcaccaccatgcttggctactttttgtattttttttgttgaggtcttgctttgttgcccaggctgatcttgaactcctggactcaagcaatcctcccgccttggcctcctaaaatgtggatttgcaggtgtgagccaatgtgccccaaaggagttcttcaagcatgagaaaaaccattccagagttaagggcagaaattcaggaaggaataaagagtaagagaaagcataaaatatgtgggtaaatctaagtgaacactggccacatcaaacaaaaataataatgacttctgggttttataaacacctagaatcagaatatatgtcaataacatcacaaaacaagggaagggactttaccagaagcaacctttgaaacaaagatctgagtccaaatgatttatttgggaagttaacccagatcacatcagtatgggacatgggaagtgaggtagggaagggaagggaaccaataaattgtgcataatcccacaaagtatcgctctggctaactgaagcttaattctgcttggaaaccctgggaacaaaggtggaaaatgcagctcagagttaatagcacctgaagcacatagaagatgggcgagttatgcagcaactgtggccagtgatgggttgaaaactactccagggaaattttaatgtcccggcacttctagccagcgctatactcagcctccacagaagcccttgggcggaggtgagtcacagatgctgggagttgtaaactgagccaggatgtgcaggaatgggagtgccaggggatttagatgggggcatagaaggcatctactgcaggaaaagaggaagttaaaatattctaaatgtattcttaatcatccgggaagaaataaatgtaccaactcatactggcgctagtaaatacaggatgcatattgcaatctgcagatttcaaatagtaaaataatatgtatttgagaagctagtagagtggtgaaatggagtaataaaaatgactcagccaggtgcagtgacatgtgcctgtaatcccagctacttgggaggctgaggtcagaggattgcttgaggccaggcgtttgagaccagactgggcaacatagaaagaccctgcctctacaaaaaaaataagagttaattaaaaacagctgggcacagtgactcatgcctgtaattctaatgctttgggaggccgaagcaggaggatcacttgagtctaggagtttgagaccagcctgggcaacatgatgagacttcatctctataaaaaattttaaaaattaacctagcactgtggcacatgtttgtagtctcagttattcgggtggctgaggagagagaatcccttgagcctaggagtttgagactgcagtgagctatgatcacaccactgcactccagcctgggctacagatgaggaattaaaaaaaaatgacttgaataatcaaaatgaagataagagagttaaaacaatgaagagagaagaaggactgatgatagattttaatcttatgtgtcactaattgcattaaatataaaaagatcaaatattccaattaaaatacaattatcagattgaataaaaaacacaatccaactaaacattgcttacaagagacacacattaaatataaagatatagaaaaactaaatataaaactataggaaaatgtagacactgtagacatcaaccaaaacacagtggatgcgcagttatagtcagataggacaaaacaaggctaaggcagaaagcattaagaagttatgactagggctaaagaggggtaatgagaaaagaatcaatcaccaggaagatacgataattctaaacttgtctgacttttggctctctgagcagcgccatggtggttggcaagaacaagcgtcttttgaaaggcagcaaaaaggaagccaagaagaaattggctcatccactttctaagaaagattggtgggctgggtgtggtggctcatacctgtaatccaagcactttgggtggccaaggcaggaggatagtctaaggcaaggagttcgagaccagcctgggcaacaaagtgagaccccgtcttttcaaaaaataagtaaatacatacataaacaaacagacaaacaagcagacaaataaatagcagggtgtggtggtgcatgcctgtggtcccagctacttgggagactgaggtgggaggacctctcaagcccagaaggtcaaggctgcagtgagctatgatcacaacgttgcactccagtctgagtgatacagggagactctgagaaaaggaaggaaggcaagaaggaaggcaggaaggcaggaaggaaggaaagaaggaggggagggagagagggagggaaaggaaaggaaaaggaaggaaggaagagagaaaggaaagaaggaaggaaggagaaagaaagaagaaagaaagaaaaagaaagagagaaagaaagattggtatgatgtggaagtgtgaaagctcctgttatattcaatataagaaatatttgacagacactagtcaccagaactcaaggaaccaaaattgcatcagttggccttaagcgtcatgtgtttgaagcgagccctgttgatctgcagaatgatgaagttgcacttagaaaattgaagctgattactgaagatgttgagggcaaaaactgcctgcctaacttccatggcatggatcttacctgtgacaagatgtgttcaatggccaaaaagtggcagaccatgattgaagcttatgttgatgtcaagactatcagtgattatttgctttgtctgttttgtgtggttttacttaaaaaatgcaacaatcagatacggaagccctcttatactcagtaccaacaggtttgccaagtctggaagaagatgatggaaatcatgacccaagaggtgcagacgagtggcttgaaagaagtggtcaataaatggattccggatggtgttagaaaaagacataggaaagacttgccaatctgtgtatattccttgtgatgtcttcatcagtaaagtaaaaatgcggaaaagcccaagtttgaattgggaaaacacatggagcttcatggggaaggcaggaattctggaaaagctactggggatgaggccggtgctaaagttgaatgagctgatggataggaaccaccggtccaataatctgtttaaaattcagactttttttttttttttgagacagggtctcactctctcactctgctgctcaggctggagtgcagtggcccaatcatagctcactgcagcctcaaactcctgggctcctccttcctcagcctcccaagtagctgggactacaggtgtgtacaaccatgcctggctaattttgtgtgtgtgtgtgtgtgtgtgtgtgtgtgtgtgtgtgtgtgttttgttttttgctggcttttttttttttttagaatttttacatctatattcatgggagagatgggctaataattttctcttcttacgatatccttcttagtttggggataaaggtcattctgtcctcatacaagttgaaaggtgctccctcttttagtggtccctggaacagcaaatatttatcctcctggaatattggatagaatccatcagtgaagccacctggacttgagttttcttcgtgggaaggtgttaaatcataaattcaatttactcaattgagtaaattgagtaatgagatcattcagatttttctactttggtaggttgtgttttttttctaagtttcatccgaattttcaaattcattggcataagagagtcattgtttatcatatcctcttctttttaatgtttgtaagatctgcgggcataacaaagtaccacagattgggtggcttaaacaatggaaatgtatttcttcacagtcctggaggctggaagtccatcagggtgtcagcagggttggtctcttctgacggcctctctccttggcttgaagatggccatcttcttccaatgtcttcacagagtcatccctctgtgtgtgtctgtgtcctgatctcttcttatatggacactagtcatattggattagggtccaccctgataacctcatttaatcttaattatctttttaaaggccctatttccacatatagtcacattctaaggtagtagaggttagggcttcaggatatgaatttggggggccacaattcagcccagaacatggggtgactgaatgtctcatatgctttgagtgtaagttgatagaaccactttgggaaatgattggacaacacgaaagctgaacagacacacattctgtaacccacggattcaattcctaggtgtatacgcaacacaaatgcacatgtgcacatcagaagacgtaggacaatgttcatggaggtgttcataatagccccaaactggaaactaaccacttctccaatggataaatcttggaatattcacacagtagaattttatggagtagcaaaaatgagttatcttttgctactgccaacataggtgaatctcatgaacataatgtggaatgacaagagccagatatgaaagaggaccatctgcacattccatggaattgcatttatatcaagttttctatcaaacaggcaaaactacttcatggtgtttgagggggagggagggtggagactgggataagaatcacaaggggacttctgttccttgatctgcgtgctagtcttgtgaaatttcagagctgtgcccttattagttccttgaaagaaaagtaaagcaaggccgggtgcagtggctcatgcctataatcccagcactttgggaggctgaggtgggaggattgcttgagccaggagttcaagatgagcctgggcaatatagtgagacccctgtctctataaaaaaaatgaaaaaaaaaatagccaggcacagtggtgcacacctgtagtctcagctactccggaggctgaggcaggaggatcacttgagcccaggagtttgaggctgcagtgagctatgatcatgcccctgtagtccacactgggctatagagcaaaatcctgtctcaaaaaaagagaaggaaagaaagaaaaagaaaaagaaagcacctcaaacaagcctgatactgatttgcaactcattaaacaacaaacacttttgtcagtacaatgcaagtatccatcttcttaggtccttgccaggcaggtggccaagaggtcaaatcagcgtgattctctccttgctgctgacagcgtttctaattcagctgctcatcaacagttctgaaaatttcccctaagggactacattttccatggtcagagaaacattaaattgactatttttagaaaaaggagctttgataagagactacttttcattatggaattgagaagaaagaattaggacagaaaacctgggtaaacgagacagaaatagacccaacaaacgtacccagatgtggtcttgatcccttaggaatccaaaactaatttataccacggattcttcttaaggatatggttctcttattcccagctgatttttaggagaatttcggtatgaggtgtccccagagctggccgagtctacagttgccattcccaagcccctcccttctcctctctcttcccggataccatggaaacccataatcaaaggcaacgccaacaactcctcttccttctcccacggggcagagctgagcgctcagagatgcagctttggatgaaaaatgagaaaaaaaaaaaagaaagaaaagaaactgagctcgctggagattcacccttgcaactcttaacaagatttggcatctgtgtacctcatgtgattctgggagaattctgtatcaaaaacagttttgtgtgtgtatgtgtgtgtgtgtgtgtgtgtgtgttttaatgacaatcttgacttgatgaatatcccagtaatcgaaggtgaggttttcctcatatgccggtgcctctttttcccttccctctaaggagagcaaactcctggcagatctcatgtgagtttttggaaataagtgtggctgttactaaatccatgcacaggagaacacattctactctcgggtggatcccactggctcttgtttgcacgtgttttggatggagaggccccttttaaaagataattcactaagcatgtcatttcggtgagttttacttaaatttcagttacagtaaaattctccccgcaggaacacatctcttgtcaagagaaaggaacttaacattttcctttgtaggagtctagctgcctctgtgagcacaaatcctatatatataatccttgaagagaaggtggagaggaggggaggagacatttcccaagggagtggctgtgattatacctacgatagcaggtggtaggagaaaaagtgaatttggcagttttcagagtaatacgacatctctagaaagccattctagatagtccaatctcatggcccattttgggggctttgatcctattgatgggactgtgtaagtctttggttccacatggccttctcactgtggcctcggctgtgctatttaaaatgtactttatcccacgcctgttcctctttagcctcctccgctttccacccccacgatacttaccaccttttaatacagcatgcactgctagtgggagtgtaaattagtcagaaataatagaaaacagcatggaggttcctcaacaaattaaaaatagcactaccataagatccaacaatcccaccagagggtacagatccaaaggaaatgaaatcggcatgtcaaagagatttctgtactcttatgtttattacagcattattcacaatggccgagatatggaatcaacctaagtgtccatcaatggatggatgaagaaaatgtggtatatatacacagtggaatactattcagccttaaaaaagaatgaaatcttgtcatttgcagcaacatggatgaactttgaggaccttatgttaaatgaaataagccaggcacagaaagacaaagtctatgtgaccttactcatatgtggagcctaaaaaagttgatgtggctgggcactctggctcatgcctgtaatcccagcattttgggaggccaaggcaggcatatcacctgagcacaggagtttgagaccagccgggacaacatggtgaaacccgtatctacaaaaaaatacaaaaattagccagctgcagtggagtgcgcccgtagtcccagctgctcaggaggctgaggcaggagaattgcttcaatctgggaggtggaggttgcagtgagctgagatcacaccactgcactccagcctgggcgacagagctagactctgtctcaaaaaaaaagctgatctcatagaagtagagagtagaatagtgattatcagagaagcagggggcagggggtgggggagataggaagagactgatacgaagttacagttagataggaggaataagttctcctatctattggtgatccattgcacagtaggatgattatgtttgtttagcaacattgtattgcatatttccaaatagctagaaaagagaattttgaatgctgtcaccacaaagaaatgataaatatatgaggtgacaaatatgctaaatatcctaatttgattattgtacgatgcatacatgtactgaaatatcacactgttcctcgtacatatgtgcaattattatatgttaattaacgcaaaaaaaataacacggtgtccagcttacctctgttttctattgtttgtggtctgtttcccctgctagaatgggaccccaggaaggcagggagtttcctctcttttatcccctggttcatactaaatgcttaggactgtgccttgcatacagtgagcactcaatagatacttgttggcagtttaaaaagtcagtaccttaattaaccaagtatcaaggcttttaatctttttgcctcaaatcaaactaaaaaccttgattaaaaagtcttaccctgtctctacaaaataatttttaaaaaattagctgggcatggtggcacctgcctgtaataccagttactcaggaggctgaggtgggaggatctctgagacccagaagagctgtgattgcacaactgctctccagcagcctgggcaacagagcaagaccccacctctaaagaaaaaacaaagtctttgctgttatccaaaaggataaaacagattttccagacagagggtcaagttgtgctatctttttccataatatcatttaaaacaaattattaagaaataagttttctaatatgaaattatacaaatcctggacattaaaaaattatgtctgcaatatttacatagcctatgatataaagcaaatttggggttaatcagtttctctaaagaacttaaagacacatttgtctttaatcatggcatgaagtgtctgatagaggaagatcatacgaaaaagtccacatctgattataattattaaactgtgtattaaacgcttggtatgtgccaggcatttttgcctaaattatctccaattttgccaacaacacttcaaggtaaatattaccatcctcagatgaaaaagttgggacccagaaagaagaaactggccaaggtcacatggatctcagatgaggacgtgggttcgctccactcccggatttctccccaaacagcgttctgggtttttcagagcacagtgcaatgcaatttcacatgtgtcattggtttcatattcgcagtcaacacacatgttttgagtaattgttatgttcctggcaccgtgcagcctttcttggagatcactgtaggaagcttggcatctcgctgggaggtactcgggaaccctgggcacatttcgggatgtgacagctgagtgagagccattgtagatgcctggggagttcggaagagggagggatcctcatgggctgggctcttgaagcctaatcatggtgtcccttggccttcccagccaggcaggggccattgttgggtctggctgcctggctgctgcatccccttgcaggggcacctcagtcctcaggagcagtgacctgtcccgtaccatgtggtcttggcagagaggtaacttcagatccatgtctcccactgtcccccgctgcccccctggcctctgtggaagctggagaggccaatcctccttctctgggatgctggggaccggggcctgtgacccatactcagacaatttcaggtccagtccactgcccagaccttggatcttaaagatggtggagcatctgctcacaaggatggcggggcatccataggcagtgatggccatggcgggaagaggccataacggaagatatctggctgtatctccaactggctgttcctaagatgaggcggtgaccaagttccctgagaacaggattgtcttccagctcccaccaaatgtgtgagcctacaatagcttcccaatcaactccttttgaattaatacaatcttaaacctgttgtccagcctatactggaaaagtaagctttttcctttaccctttatccgaaattcaacatggatggatataggtcatgaaaagacgttctgcggacaatcacagaatcagaaggtgaaatctgcttttaaggagtttttctttacctactctgatgctttctccacaggctgatgaaggctgcctgattcttacttaacaaagctgggaaatttcatcagcctgggcaatatagtgaggccctgtctctacgaaaagaaaataaatacaactttaaaaattagtcaggcatgaggtgagaggatcggtgaaacccaggagttcaaggttacagtgagctaccattgcaccactgcactccagcctggccgacagagcaagaccctgtctccaaaaatagttatcataataaaacgctaggaggtttcagtgttttcttcattcttccgaagctagggaatcacacaccaggacaagagagagagcccatcaatttgccatgggagagctcaggctttccgggttgggctggggttctggctgaggcatcaggagctgggcatcaaggccctgggctccctgctgggtttgatctgtggactgatgcagggagaggctttcctgtattttggcccagagcacatgatcttatctgcaaaaccgcagcactgtgcctggtgctgaaaccatgagagaattaagcctcgatgacccagttactggacaatgctgtccagctccaggactgctcgttgcttccacagtatgatgtgttaattcgctgactgtattttcagagtccatccactgccctaaactctctgcacccacagttccaatggggagcagtaacttcagttcatcaaagccaattattccagttcttctttttcagcttggatttttccatttcaagtcgtcatgggaaagtaagtcttaataaatccctttatgcacggagaactagggcaattactgacattttaagaattattgaaacttttttaaagttttttgattaaagttctaaaggacataaataatccttttttggtttttggaagggcttcaattattttcaaggacagaagttgggcacacgggctgttcaaatctaattaattatctggctgcgcccacaaaagtcacaccttcaaaacactgaggttacagctaatcatctgagattctcccacactgggataactgtacccaccctctggggccatgacagatacaagtacaggatgcgttataggaactcaaggtgcacctctgcagggaaatcaagttttgtttgtttgtgactcaacgatttagtcgtgcattaaatattcaatatctgatgcaagagatttaaaatcctgaggtggtaccttgaagcaaaaaacacacaggctgggttaaccaatcacattaatatttttataccataaattagattagaaatcccacagctgggaaaagccagggtggaaagatcccagggaatgatgtggctccgaaaaatcagtggtgagcaaacttcatgaggctggataggggtctgttttggtttaggatcaataggaaactgaaggcaggtaacctttgaccattggagagacatacccatgccaaccagagttcactggagttgatttactgcactacggtatgctctaaaaataagcacatagtttgactgaaacttgcatttgagttaaaaaaaaaaaacaaactattgtttttagtttaccatgcattggtaaatttcgaaagaggataagagctgggcaggaggatcacttgtgggtgggagttcgagaccagcctgggcaacatagcaagaccctatcttcaaaaaattaaaataacttcgttgggcgtaatggtgtatgcttgtagtcccaacactttggaaggttgaggtggggagatccttgagacttggagttcaagactagcctgggcaacacagcaagatcctgtgtctacaaaaatttttttaaaaacttagccagacatgatgatttgcacctgtagtctcagctacttgggaagcggaggtgggaagatcacttgagcccaggagtttgaggctgcagtgagccgtgatcgtggcactgcactccagctgggcaatagatcaagacctagactctaaatacataaataaaaataggataagagaaaaaatacttgactttgaaacctctattggaaaagctgcagaggtcatctgtaataaggcaaaggagagaatggagcagccacacctccgtcattgctgaaagccaaattctttctattgactccagaagaagacatattacgccagttttttaaagctgccatatgtcttatcagagtcacagttgagtagtggtatgtaggtctacggtacaaatacaaaaataagtgtttgagcaggtcacaacatgcccacacaccgtcaactgcatcttttctttggcagaggagtctggaattcacggctccaaggaaacaactgtttgtcaatccaaaccttggatgccgatactggtgggcggctcagtgatgacgttcctgtgtgactcaagtggtttctaaaaggcaagaagccatccccgtgaggcatacggtgaccagtgctgaatcttccaacaccatttcccacagggatcagttgcagtcaagagaatctgtttttttcagaggaggatgccctgtgtgagggaagagaggggtgagcagctgaaggaaggtgaatggacagaaaagctggacacactggccagactggggaggggggtgggggctcatgcctgtaatcccagcactttgggaggcccgggggacagatcgcttgagcccaggagtccaaggccagcctgggcaacatagtgagaccctgtctctacaaaaaaaatacaaaaagtagttgggtgtggtggtgcacacctgtagtcacagctactcaggaggctgagaggtgggaggatcacttgagcccaggatgtcaaggctgcaatgagctgagatcacgccactgcattccagcctgggcagcaaagggagacctggacttaaaaaaaaaagaaaaagaaaaagaaaaagttggacacggcaggccaaaagactgagttctacttgatcattgttgttgaatctgggagaagtggtatttggacccgaatgcctgagagcaagtataatactgccaacaggggctatgacttggctacaaatggctttaaactgaagttgccagtgtgtgccccctactctgtgtgtgccccctactctgaaacctctggcagcacctcatctttctgaggatgggcagggagcagggccgccgctaactccgtatctcagttgcccaacttgttccgaaaggccctcgacttttcgccttcaccttttcagtgatcagatacagaaattcatgtgacgaaaccaattgctgatgaaaagttcatttgccaaaggtcctcattatcctagaacagatagaatggcgataacaaaaaaggaattggagtgaatccacttaaaacaggaacccatattgcatatacagtgaaagaagatatgattggagctttgccttgagaattaaacaagcattacaaaaagtcagttttattttatatttcagaaaactaggttatagctgcaattatgcattgttcttaaaaatcagtgacgaatgagtcaagtgttgatgggggaaagctctgatgaaggcacgtgatgaaggcatgtgatgatattctatggatttcccgttggactgtcacagtgtaatcacaaagacagccactttattaattttccgaagagcatccgaatcctctgctattaaactcattctctttcatgtcagtatcctgtatccaccgatttctcttctacagttgttaacctgtctgaatcttgtctcattcacctgtcaatggctttgctcctgatacaagcaatcaatatggctttcacaggctgtgtataatctggcttcttctgcaatttcacttatggtagacctatcttatgtgtcttgcatcccactccattgctaggaagagactgagccctcagaatggtcacatggtaggcaaaatggctcccctattgggtcaggtacaaataaagctttgactataacctcaaattgtaatatatactgttcacatcactcttttttttttttttttttgagacggagtctcgctccgtcgcccaggctggagtgcagaggcgcagtctcagctcactgcaagctccgcctcccgggttcacgccattctcctgcctcagcctcccgagtagctgggactacaggtgcccgccaccacacccggctaatttttttgtatttttagtatagacagggtttcaccgtgttagccaggatggtctcaatcttttgacctcgtgatctgcctgcctcggcctcccaaagtgttgggattacaggcgtgagccaccacacccggcctgttcacatcattcttttgtcttttttattttttatttttttatagagatggggtcttgctatgttgcccaggctgatcttcacctcctgggctcaagccgtccactcaccttggcctcccaaagttctgggattataggtatgagccactgtgcccggccctcatcattcttttctaaacataattgaaattgccatattatatctgaaagatttattatactccaaataattttcttttttagacggagttttgcttttattgcccaggctggagtgcaatggcatggtctcagctcactgcaacctctgcctcccagattatcctgcctcagcctgctgagtagctgagattacaggcacatgccaccacgctgggctaatttttgtatttttagtagagacggggtttcaccatgttggccaggctggtctcgagctcctgacctcagatgatccgcctgcctcagcctcccaaagttctggggttacagacgtaagccactgtgtccgacctccaaaagatttttaaaagatgatttctcttttgattggcaagttatttgattatttaaaagatcctttttattgcattttggacaatgaaagtcctacttttttggaatatattaacttttctttattgcttaaggtaaaattcttttgtgtgtgaatgttctatcgatacttaaaaagaatgtatattatttgacctatacagcattaatgtattttctctattaaatcatgttgtatgttgttattcagatcttccttgtctattttaaaaaacagacttatgaagatataatttatatacaattcaatgatttaaggtatgcagttcaatgttttttggtgcattcacagagtcatgtagcaatcactgtattgtaatttagcctaacttaccaaagtctttgcagatttataacgacttagttccagtgaaatatagaatcctgaatagctccattatactcccttctaatgctattattatgcattatagtataatagtatttatgcatttttaatagcattcctgcattattattgtttatgctaatatgttatacatattattatacatattatgtttctatatgttaaaaacccaacaattctttggtatcattaatgcattaggtagtctgaagtcttttaaagaaactgagagaagaaaggagaaaaagtatatctacacagttgggcacggtggcacatgcctgtaatcccagcactttgggaggccaaggagagtggatggcttgagtccaggagttggagatcagcctgggcaacatagtgaaaccctgtctctacgaaaaatatgaaaattagccaggtgtggtggcacgtacgtctatagtcccagctacttgggagactgaggttggaggatcgcttgagcccaggaggtcaaggctgcactgagctgtgattgtaccactgcactcctgtctggtgacagagcaagaccctgtctcaaaagtatatctatagagttttaaaattttatttatttatttatttatttatttatttatttatttattgagatggagttttgctcttgacgcccaggctgcagtgcagtggtgggatctcggctcactgcaacctctgcctcctggattcaagagattctcatgcctcagcctcccaagtagctgggattacaggcacccaccatctcgcctggctaatttttgtgtttttagtaaaggtggggtttcaccttgttggccaggctgatctcgaacacctgacctcaggtgatccacccgcctcggcctcccaaagtaatgggattacagtgtgagccaccatgcccggccactaccttttaatttacccattccggttgtctttgtttattgctatagtttcagctaccatctcatgtcctttccttttcccagtatagctttgctctcaccttccatgtagcatcagtgtcaagtacactgtatttcagtagattatagccccaacaacacaattatatacacattgttctatgaaattactttataaatcagttaaaataagaaaggagaagaaggtcagacatggtggctcaaaccggtaatccctgcactttgggaggctaaggcaagaggttcacttgaggtcaagaattcgagaccagcctgggcaacatggtgagaccccatctctacaaatttttttttttttgagatggagtctcgctctgtcacccaggctggagtgcagtggcgtgatcttggctcactgcaagctccgcctctcaggttcatgccattctcctgcctcagcctcccaagtagctgggactataggcgcctgccaccacgcctggctcattttttgtatttttagaagagactggtttcaccgtattaaccaggatggtctggatctcttgatccacccacctcggcctcccagagtgctgggattacaggtgtgagccaccacacccggcctctacaaaatttttttaaaaaattagccaggtgtggtggtgcgcatctgtggtcccagctatttggaagggtgaggtgggaggattgcttgagcccaggaggttgagactgcagtgagccgtgtttgcaccaccacacttctgcttaggtgacagggttagaccctgtctcaaaaaaaagagagaagaaatatacaattatatactgtcttttgtaatttctacataatttcctttaccaatgttctttgtatgtgtgtattgtgtgtttgtgtatgttgtgtgtgtgtgcatgttcacattactgtctggagtcacttgctttctgcctgaacacttcttgtcaagcaggtgtgctatcaacaaattcaggttttgtttatctgggaatatctttatcttgccttcgtttttaagagagaattttgctggatataagatgcttgctagatgaaattttattttcagcactttgactgtatcaacccactgcctctggcttccattgtttctgatgaaaagactgctgttaatcttactgggaactctttacatgtgacatgttgtttgctcctgttgcttctaagatttttctttgtcttgcagcatctttaccgtaatatatctggatgtggatctctttgtttggcatacttggaatttgttgagcttcttggctgtgtagattaatgtttttcatcaaatatgagaagtttcaacctttgtttctttgagtacattgatgcttctgcctttcctctttacctgctaattcttctgtgtgtattttggtgcatataatggcatctcacatcttcctgaggctttgataatttttctttctgctcttcatttttttaattccctgtacttatgattggataatctatattgatctagcctcaatttcactgatttgctccggccagctcaaacctgctgttgaatctctctagtgaagttttaatttttttaaattttgcttttcaattctagaatttctatgggtttctgtttaaataattttgtctttttcttgatgttctctgtttgatgatatgttgttatcatcctttcttttagttctttaagcatggtttcctttagttctttaaggatgtttatagtagctgctttgaaggtttttatgctatttcaccatctgggctccctcaatttcatgtatttttaagtatttttctccctggcctgtcaaagaatgagaggtatattaaggtatcccactaaaaatgtgttttgtacatttttttcttcaggttcctaacttgcatttaaaaaattttgttgatgttagtaggtgtatagttttctattatggtattattaaatattgagcaggtataaattaacattcataaaataggagttaaatattaatggcataacaaatatctgagtttctacccattgcatttgagaaaacacattatcacaaattttttccctttttattttgaaaaatgaatttggaggatttatactaccagatgtcaaaccttattattatgtttaccatagcatattattatgctatcataaaagactgtgatattagcactagtgtagacagaccattgtaacaaaacagagagtctagaaataaatccacacatatatggccacttaatttataattaaggagacaaatgcagagtggtagacttgatgtatagaagctcatatattaatagtaaccccgtacgtgttatacatgttacaaatgttttctcccatttggtagtttattctttaaccctttaacttaaacctctacttttttcttaatagctgtagagtgtaataacaaagaaaaaaaactcttttttcttttggtcacacagagtttatttatttattatttttattttatttttttgagactgggtctcactctgtcactcaggctggaattcattggtgggattaccgctcactacagcctcgacctccccagggtcaggttatcctcccaccccagccttctgagtagtggggactacaggcacacgccactatccctggctactttttgtatttttttgtatagacagggttttactattttggccaggctgttcttgaactcctgggctcaagtgatctgcctgccttggcctcccaaagtgctgggattacaggcaggagccaccgtgcccggcctactttttaattttaggtggtcaaatatgttgcttgttcttttttggatcctaggtctcatgagatcattactagaactttctctaacccaagtttataaaaatatttccctctaatgatacaaaaagggctttttaaatacttagatcttaattttcattcagaacttattttcatgcacaatgcatggtaggtgtctaacaacagcaaattgtcactttaccatttattgactaagcctttcttcccccagtaacttagagggccaaatttttatcctgtacattcccacatgtaactgtctgtgctttggggctgtctgttctgttccactggtttatttgccaactcttgggccaatatcacattcttttaataaatataacttactactatatttagagttgtgctagaacagtgtctcttcatagtttttttccccaagcctttcaaatccagatgcactggcctaggccaggcaaagctcctaagtcagattccaagaaatatctttgatggtagtgttcctagaaacaaccacacaaatacactggacataattctatctccagccccatgctgccctgaagtctcactttttcgtggtcagctctttttttttttttttagatggagtctcactttttcacccaggctggagtgcagtggcatgatctctgctcactgcaaactccgcctcctgggttcaaatggttctcctgcctcagcctcccgagtagctgggattacaggtgcctgccaccacactgggataaattttgtatttttagtagagacagggtttcaccaagttggccaggctggtctcgaactcctgacctcaagtgatctgctggcctcggcctgtcgaagtcctgggattacaggtataagccaccatgactggcccagggtcagctcattctttctactattcttcttagctctcatttcacacttaactctctctgtaaatcaccatctctccatttcctcctccaggatgaactttccttctattttacagagcaaaacccatgatatagaaaccccttaactttctaatggcaaacctaaaaacttacacttagatccatctgtttctttccctattattaaaataagagtagagtcctgccctctctcttcctcctaagctaaagtaagctctattgagtgagatctggtttcctcccatacccttaggatacagctcggctctgtcctccctgtctgtgtttaaacatgcccgtccctcccactcgaacacacacatgttcacgcacacatctttaggctccagattctcctgcagccatcttgctatctcctctcgttcaaagctacacttctagaaaaagttgtctaactcattgtttcttctctcattcatttctcagcctactgcaagggccgctggtcacttccttactgttaaatctttactaatattcctgtctccagtcttgctctcctctaaactgtttctcaccatagaagccagaataatccttttaagatgcaaatttggatatatgattcccctccttaaaagctttcatgacttcttattgatctcaagatccagactccttgacaaggcctccgcctccagtcttctcaatcccatgagccctttccaatcctaaatcctggccacaccaagcctttccctgcccctggcttcctcactatgcgatcacctggtctttcattccgcacgtttgcctggctagctcctactcaccttcagtactccagcaagaagacgcgagtgaccaccctaccactccttcccccaccccaagaccacatgaaacacccctactttgtattctcccggcacccagcgcttattcccactacgtggaacattccttacactgtttacttctctctctctccaactagatggaagacactctgacaaacggggtcatttcttaattattatttaactccaacatttagccaagtgcctatcgcacagaagatggattatggctatccgaaatgaacgaatagctcctctattagccacagaactcagcatcacctgtgaccttttgttttaactaaagctattcactcattcgttcatcttattgcggtaaaaacacatatcataaaatgtaccatcttagccatttttaagtatacagctcagtagtgttaagtgtatttacattgttgtgaagcagaactccagaacgttttcatcttgcggaactgaaactctgcacccactaaatgattccccatctctctcctgctcccaggccctggtaacccccattctgctgcctctacgaatttgactgtgttaatacctcctatactgaaatcatttggtatttgtccttttatgcctggcttattttattcaacgtttatccaggttgtggcaagtgatgggatttccttcctttttaaggctgcatagtattccattgtgtgtatatactatattttatctgttcacctgtgaacatccgtgaacatcatatttttacctgtctgtgactttttatgatgattttctatagtatttagaattttggattttttgcaagtttctgattccacaacattcaaatatactattacaaagaatacatgcaaatatatgctttctataaatacaaagggctttttaaaatagaagcttttgttactatcataaagttgttcacactttttgaaataagaagctctttttgttcaaatgttttatattttaacatatatttcactgtatcagtccttttttttttctccacaaaaacactttttatttgaggcaaagagaagtcttgctgaagggattacagttccaagcagccaaaactcaactgttagtggcactattttgacctggtagatgttgcttctctttggtcagaaaagggtattcaggttgtactttccccagtggggcaaaaaggagggcaaagcaaactggaagagacttctactctattgacagggctcttcagatccaacatcaagctagacatgcccttgctggccactctacaggttgctgtcccactgctgagtgacacaggccatgctacatttgcaaggaaaaaaatgagacaggaaacacaggtataggtcacttagggatgagcaggcatccacagcttcaaaactcttcatggaaggggtaatccttgtgggaggcacagctcaccaaggcacagactctccaattcctgttgtagctgagtaaggcggtcatatcctggctgttcagttcaaagtcaaaaaccttaaagttgtcagcaatgagttctggtgtcacagacttggggatcacacccaaattcctctgcatggggaaccggatcaggacctgggctgtagttttattgtgcttggctgcaatcgccttgatcctgggatccctcaggagggaagggtcctcggggttgacccagggcctgctgggagtgccaacggggctataggcggtcaccacgatgcctttggactggcagtactggattaacttctcctgagtgaggtaagggtggcactcaatctggttaaccacaggcttatactttaagccaggtttgtttaagagcctctccacttggaggtggttgaagttggagatgccaatagctttcatcagccattcatccaccagctcttccatggctgcccatgtgtccagaatgttggtgtcactgggaaccacattacccaactcattcaatggaaaaattccctcccaggcttaaagccagtcggccaatgaataaggtagaggtccaggtagtccagcttcaggctgctgagggtcttctggcaggctcccttcaccaggcccttcccatggtatgtgcaccacagcttactaacgatgaagagctcctcacgctttaccacctgctccctgagcttctcctgaatggccacccccacctcattctcatgctagtacacgtgggcacagtcaatgtggcagtacccgacattgatggccacattcacggcctcagtcacccggcctggaggggacttccaggtgcccagccccaggatgggcatcttggtgccattgttgagcacaaggtggctggccatggctgctgcgctccctggaattgtttcatactgtcttgtgtgccttggaagacttatctcctgttctctgccatgctaaccagtgctatgtataaccctgcctagtacagggtggtgagggaggggtgcctgtctcttcagcacaaggctacttccactccccactcccagcaaaagctgatctgaccggaacaatgatcaaaagtaggaaaataacattggccaggtgcagtggctcatacctgtaatcccagcactttggaaggccgaggcaggaggactgtttgagcctgggagtttgagaccagcctgggcaacatagcaaaaccccgtctctacaaaaaatttaaaaattagccaggtgtggtggcacatgcctgtagccccagctacttgggtggtggaggtgagaggatcccttgagcccaggagagccaagattgccccactgcactccagcctgggcaacagagcaggaccctggctcaaacaaacaaacaaacaaaaccaaaaaacccaaacccaccaaaaaaaaaaagacaaaaaaaaattaaggaaaataacattgacataatactattaacagacttacagatccaatctgattattttctcgttttcccactgatgtcctttctgttccagaatccattctagcagcctatgggacattgttgtcatgtccccttcatctcctccactacagagcagtttctcagcctttcttcatttttcatgatgatatttttgaacagtactggcagctatttcatagaatgttcctcagcttgagtttctatgatatttcctcatgatcggattgagactgtgtatttggcaagaatgccacatgggagtgagactgtgcacttcttggtgcattgcagcagggggtccgtgatgtctccgtgttttattgctggtgatgtgaactgtgatcacttaggctaagatggtgtcttccaggtgcaccactgcgcccagctaatttttaaatacgttttgtagagaaaaggtcttgctatgttggccaggctggtctcaaactcctggcatcaagtgatcctcttgcctcggcctcccaaagtgctgggattacagatctgagccatcatccggcaactctctcactgtttctacccagttcccatatacctcttgtaggtaaccatctcattagcctctgatttattcttcctgtacttcttttgcagatatgatcccctgcccaagtttgatggtaaatcaacaggtgcagcagccaagacttgagaaggacatggtaatagagcatgcagatttctcagacatgaaggtgtgggtcaccccacaggtgaactacttagaccaggagaggtgtgctagccaagggtgagggaatctcgaatgggtagtaggggaggcagatgatgaaaaccagctatagccttgaggtcagctgtagcagtaggagctgctgttcatccttcatcccactagctgtcctcttggaggcttctccaggaaaggaggccatccagaatcccagagaagctgttcactgatgggattaacttactacgtgtaagtaagaagtggatccgagtgacgcaagaagtggattgcagtggaggtcattgtgtgcctcccagatcccacattcaggttggagggacccatttccccagctgtgttttctaaagtctcataggtacatagcacagtaatatgtatatacaacagagtcttgccaagcacaggggctcatgcctgtaatccccatttgtggggcttaggtgggaggatcacttgagcctaggaattcaggaccagcttggcaacatattgagaccctgtctttacaaaaaattgaaaaattagccaggcatggtggtccacaactgtagtcccagctactcaggagactgaaacaggagtctctcttaactcttcagcccaggaggtcaaagctgtagtagcaggccatgatggtgtcactgcactccagcctgagtgacagagcaagaccctgtctctaaagcacacacacacacacacacacacacacacacacacacacacacagagagagagagagaaagagagacaatcttctctataagaacaaagtatacacacaggccaggactgagactggagtttggggaatgggaaggatttggatatatggaattgggaggaaatggcccaccagatggcatatcagaatgaggcgggcatttccagcttttcttgatcatcctccacctccctctccctagaaggaagaatcctcctccttccctctcccacttccctctgccctagacacactccgatctcacaagccattctggctgctgcgacttttagttttatccgtcgtctagctgagattaaactggaatgttccatttgctcttttggctctcaagtaggctcagggcttcccacctatgggtgcagttggatctttttcactgtaacagaacaaatgctctgacctccaccacaaagtgtttctgagggtgcccggccttagtgagttcctgggcaccccccataatgtacccaggccattcatatttaaggcccccaaagtctcctgagggcttcagtggagcctctgcttcagctccttcttcttcttcttcacaaagttgatacccctatgccaagggcacggattcctgatttttacaagaatcacttcctagaggcatcaaagtggtttctgcattcactccagttcccacttggctgaaggcacaggggatcgttcacggaggtcggggggaaagtcactctctttgtaaggactacaaaacagcacttgtctctccccaaatcccagtttcttctgcacctcagttcccccccagaaacctctgcaaaggaaagacaacaaccccaccttcctcttccagccaaaaccccaacatttatgcaaatagactggcgactccacctgctaaacccaagtcaatatgaatcccagttgaggctgacacaggaactgattattaccgtgggaatctaaacgaaaaataagatgaaaaaggagcagtcacggcggcctaggagtggacgcagattcctgacgctaagcacagggattctaggccacaagcccacctggcctggctgtgtctccttggccctgtctcatctgttgggcaccagctcccccctgcccccttctccagccccttggcttggtcctcacaggactcccagaacttgggacagggcctggctcagagcaggaattcaatcaacatctattgactgagacagatgaaagagaataggagaatgagtgccagggacaaccatgtccctctgtctgggaagcttctcatttccttctcagctcagtcttgtggcttccaggggttgacctggtgtttggaccttcagcggaggatggggcttccccactagacccaaaaatggtgtcctgggcttctccgtcaccctgcagtctcaaagtggacccctccacctccccttccttctttctatccctctctcctcctggaggagctcctgtagatctactctccctctctgctccatttctctgcatgatttgggtttgcctggcagaagcacagtcaccgctcgtggactgagggagggagtggggcctgaggctcttctgctgctttcttctttacccatttggctaaaatctggcctgggttgttaatgttttaaaacagtactgttttaggttaatgttaagactgcaatgcatcccaaatacttaaaaaaatttctcagaactattttatttttaattaattattgtaagagatagggtctcggtctgttgcccaggttggagtgggatggcactatcgcagctcactgtagcctcgaccttctaggctcaagccaccctcccgcctcagtcttccaagtagctgggaccacaggcacacgcccatgctcggctaatttttaatttttttttgtagagatggggcctcactatgttggccaggctggtctcaaacttgacctcaagcaatcctcccacctcagcctcccaaagtgctaggattacaggcactgtgcatgactcaaaacaacttaagatttataaaaaattgagaaggaggtatagatttcccagtttcacctattactaacaccttacattcatatatttgttatagttaacgaagatatattgatacattatcattaattgaagtccattattaaatattgcccgtacttcaaatctggatttccttagtttctaatatcctctttctgtttcaggatcccatctaggataccacatcacatttagtcatcatgtctctttaggatcctctagaccaggtgtccctatttcctgagccacagacccattagcaaccgggctgcccagcaggagatgagtggcaggtgagcaaaagttactgcctgaactctgcctcctgtcttatcagcagcggcattagactcgcacaggagcacaaaccctatcgtgaactgtgcatacaagggatccaggttgcacgctccttataagactctaatgcctgatgatctgaggtaggacagttgcatcccgaaatgatctctcctcccctcctgctccctatctgtggaaaaactgtcgtccatgaaattggtccctcttgccaaaaagattggggactgctgctctagactgtgatactttgtctgactttccttgttttgatgatcttgacggttttgcgaagtcttaggtaggtattttacaaaatgctgctctattggaatttggtgtttttcttagactggggttatgagttctcaggaggaagaccaaagggtaaagggccattttcatcttatcttatcaaggatacttgctatcaacacggtttatgactgctgatgtggacttcgatcacctgctagtctttgtcaggtttctgcaccataaagttactctttcttctcctccatattctacgcttcgaaaggaagtcactgtgtagcccacagttaagaatcagggagtgtagctctccagcctgagggcagactatcaattattttgagttctgcatgggagatttgcctcttctctgtcatttatacatttattccatcatttattaacatccgtagggactcatggatattcatctcatactttgggttataatccaatactacgttatttgttttgccactcaaatagttccagctttgggcactgggggcactttcatttggctcctgtggccctttgatatagtcttatggatggaatgtttatgtctccccaaattcatatgttgaagccctgccccacatgtgatgatatttggagatggggtctttgggaggtaatcaaggttaagatgaggtcatggggtggggcactcgggatgggattagtacccttatatgaagacatgctggagaattcggtctctccccacacagactccccaacaagtgcacaaagaagagatcatgtgagcacacggggatattgcagctacctccatgccaagaaaagaggcttcagagtaaaatttacctcgccagcaccttgatcttggacttcccagcctccggaccatgagaaacaaagttgtgttgtttacgccctcaagtctatggtattttgtcatggcagcctcagctgactgagacacacctccccaattgcttcactttctgaggacttccttactttctggcactgcaagatgttccaggctcaccttgtatatttcctgccccagccctagaatcagccacttctgtaaggagccggctcctgttattggagaatagtattggaaaccaacaacaggctcctaggtagcaaattattcttggatggacacactagaaaacagttattttgtgcctcctatgtgccaggcactatgctagctccttttcatgttggtttacttaatcctcataacaattctatgaaatatttactgtcaatcctccccagatgaggactggaggtgtagctgggttgagtgctagccaacaccactctgttctgtctccaaagcccatcacactgccttgataaagactggtgtcacatacctcacaaacaccatgttttttttttttttttttttttgagacagattctcgctctgtcacccaggctggagtgcagtggcgctatctcagctcactgcaacctctgcctcctgggttcacgccattctcctgcctcagcctcccaagtagctgggattacaggcgtgtgtcaccatgccgggctaatttttgtatttttagtagagatggggttttgccatgttgcccaggctggtctcgaattcctggcctcaagtgatcccagatggcacacatctctccttatgtgcaaagatgacagccacctgtgtgtgcacagatgcatgcagctctcctcatgtgtgcaggtgatatgtacctatttgcatgtgctcacatacctttgtgtgcagagatgacatgtacttatccttaagacagatgatgtgtctcaactcatggaataatgaaatctgacaaactgaaaagtgctttagaatggacattcacagtacttgccaactgctcaagcttagaccgtgtcagattttttgctatcatccataggactcccttatgagatgtgggtatgttctaagacaaacacttagcatcacagctgttaggatttcaaacagtgcttccagagataaaactggaggtttacattttgccctcaagcatggggatcatatcacacaagaaagaacagattagtcagccagggtgagtaaggcttccatcagagcgaccacagtgtgatctgccacttgaaatgcctattgatgggtttgtctgcccagcacttctttttcctccgagatcagcccctgccaacctctccagagcagccatgttcatccatcatgacctgcttttaacacttgatcattcctagatgagcacgtgacccagctgtgccaatccaagagtccttgcctaggactgttggaacaggaacttaaaatgagagttggcccttctttagggactgaagctgtgaacactgagattgtcattggccgtgtgaagaaggtttatgtgccagcagaaagcataatgaaatcaacaggaagacacatacacacttacacacacacacatacacacagagagagagagagagagagagacaaagacatctgttcttggttctgacatgacctgggtatttcatggagtggcctagcatctttcaccaagggcttgcttaatgcttaggctagtcagggatggttttcacttacttccaaccaaagagcctttaccaatgcagaatgattgataatcatattatcaccaacatactgcaagacatcaactgaaactcaaatctgacggacattttcccagctctcaaatattacagatacagtctggatctcctgtcaaaggtggttaacttggctgtttagtttttcagaaactttccaaatatacattaatttatttcagtttgcatagtaaacttctattgatctggctttcaaatacaaaaaaatcaaattactaaattgttcctccactctaccttgtggaaacaaatgaaataaggtgtggtaactaaggaactgctctaaaaataacaccttttaggatacaacatagggtcaacatcatgaccttcaatattttgtgtgtttagtgcctgaatcagcaaagcagtataagcacagcttggcctcattttgcagtgtgttttagtctactatgattctatggatgcaatttgtttataattcatgtatgagcatcgtggtaataatagctaatactttttttattttttgagactgagtctcgcttggtttcccaggccgatctaggctcactgcaatctctgcctcccgggctcatgtgatcctcccacctcagcctcctgagtagctgggaccataggcacatgccacccatcacacccagtactttgggagaccgaggtgggagaatcataagcccaggagtttgagactggccgggacaacatagtgagactccatctctaaaaatatttcatctctcaaaaaattttaaaaataaaccaggtgtggtgatgcacgtctgtagtcctaactacttgggaggctgaggtgggaggactgcatgagcccaggagttcaaggctgcagtgagctatgctcatgccattgcactccagctttagcctcccaaagtggtgggattacaggagtgagccactctagccagccatgtagctaatacttttgaggtaccaagcaggcactgttttaggggtctagcacactaattcctttaatcctcagagcgacactgttgtcttctccatttacagatgacagagaggttaagtaatttggccaaggctgcacatctagcaagcggtgaagctgtggacactagtgttcatatctcttaggtaactaatgtagttaatcatagtggctgtcaggtaactacaatattcaatgaatacaacagcctacttcccaagtcctttggagggtttttttattttaaatttttttaaattaaatagagatgaggggtctcactatgttgcccaagctggtcttgaactcctggcttcaagtgatcctctcacctcggcctcccaaagtgctatagaggctactcagtctttggatttgtagaatatatattgattactgtaaggcagagagatatgcaggaaatttttcttttactgtgatggcttggatccctgtgacttgtaaaaaaagctacatagtagacctccaaggcttcaccaggctctcgtttccttatggagaacaaatctttcggaagcttctatctcttagggtaaaaatctgaatgtttcttgggcccacatggccctgcctatcttgttggtctccactttactttcagccactttagccttaaatttctcccatcacagggccccggacaagaattccctgtgactgctgcacccacgtcctctgtattgcctagccaaatcctgtcaatttttcaggcttccccggacccatcagactaggtctggttcgcttctgatttctcacagcgtcttgtactgctttcttgtagtatctatgaaaatggtaattgaaaaattgtggaccaggggaggtagctcatgcctgtaatcctagcactttaaaaggccgaggtgggtgcatcacttgacctcagctgttcgaaaccagcctgggcaacatggtgaaaccctattgctacaaaaaatacaaaaattagccaagcatggtggcgcatgccttgtagtcccagttgcttgggaggctgaggtgggaggatcacctgagcccaggaggtccaggctgcagtgagccatgcttgccccactgcactccagcataggtgacagaaagaaaaattgtgtaattaccaaacgcctgtctgcctggctgtaagtgtaagttccatgtgggcagtgactgtgtgtttgtcttgctcattgctgaatctccaacacttagcctacggcttagtacatagttggcaccaaatgcatacttgtaaactgagtagaagaaaaactaccagctaccagctgaaaagaaaataaatacccgagtgtcctgggcactgactagacttgctgggtgtgtaagaaggcctgcccagacacagatacaaagaatgctggaacagcttggcagggcggtttgcaaaccaaaggataactgaatatacctatgcaagttcttttttttccccttacacatttttcttttttcttttctttccttttttatttttatttttttatttttgagatggagtcttgctgtcacccaggctggagtgcagtggcgtgatctcagctcactgccaacatttgcctcccgagttcaagcaattcttctgcctcaggctcccgagtggctgggattacaggcacccgccaccacgcctggctaatttttatatttttagtagagacagggttccaccatgttggccagggtggtctcaaactcctgacctcaggtgatccgcctgcctcggcctcccaaagtgctgggattacaggcgtgagccactgtgtctggcccccttacacattttttaagtgattaggaaatattcagggtaaaattatgattttgtgagcaataaatcacaatcctattttaatagtactaaaatcttgatcaaagcaagttcaggcaggacttggttactcacacccttaatcccagcaatctgggaggccgagacagaaagatcacttgagcccaggagtttgagaccagagtggacaatatggtgagaccttgtctctacaaaacatttttaaaaaattagctaggtgtggtggtgcatgcctgtaatcccacctacttgggaggctgaggtgggaggatggcttgagcccaggaagtcgaggctgcagtgagctgtgatcaagctgtggcagtgccattgcactccagctggggcaacacagcaagatcgtctcaaaaaaaaagaagaaaagaaatttaagctgagaatactgagagccaacgtgaagaaacacacttgtttcaatgacacttattctcctaagtgtgcatctgtgagcattattacctgtttttttttttttggagacagggatctcattctgtggctcaggctggagtgcagtggctcaatctcagctcactgcaacctccgcctctcaggctcaagccatcctcccatctcagactccagagtagctgggaccacaggcacagcgccaccacacccggctaatcttctgtatttttggtagagatggggtttttccatgttgcccaggctggtctctaattcccgacctgaagtgatcagcctgcctcggcctcgcagagtgctgggattacagacctgagccaccgcgcccagcccattgttcaccgttgtgaccccttttaatttttatttattgctttatcatcttactgattcctcgaaacaatcttacggggcgagccggttccatgggcgctgaagaaacatttcctctttcaaagcctcaattgtttgaacgatacgcgttgctaaagaggaagcaattaaacctatcaggcgagttctgccctccgcccagcgagctgctgcttcctggtgttaaaacgctttcggggccaggcgcggtggctcacgcctgtaatcccagcactttgggaggccgaggcgggcggatcacgaggtcagaagatcgagaccatcccggctaaaacggtgaaaccccgtctctactaaaaaaatacaaaaaattagccgggcgtagtggcgggcgcctgtagtcccagctacttgggaggctgaggcaggagaatggcgtgaacccgggaggcggagcttgcagtgagccgagattgcgccactgcactccagcctgggcgacagagcgagactccgtctcaaaaaaaaaaaaaaaaaaaacgctttcgggttctcctggcgagttttaagtcacactggatcgctgcttattttcagagatcacctcgcacccatgcacctggaaggcacccaaagagaatcattttaagaaattcacttcatctcaccctaacaacaaagcacagcctgcagcacatggatttcacccatgtgacatcaatgctaatcctatgtgtgaaacatctgggttcattcgattttttaaaaattagtaactgagatggggtctcgctatgttgtccaggctggttctccaacgcctgggctcaagccattctcccgcctcggcctccctcggcgctgagattataggcgggagccaccgcgtcagcctccactctttttgcggcgacaaagcccgcccgcctgcggggcgttccgttcgcagaaactctgtgagggacgccgcgggggcttccaagggacgcggcgaaaccaaaacagtcgccggtggttcacaaaaccacctcagaaaatgcttccaaaggcacgtctggcctccacaaggtgacggcttttcagcctccgactcgaacttgagtcgtccacagcactaggccgccgccagcccgggcgagctgcctagggaccgcggacgccgcagcaagcagctccctgctcccgccacacccgccgagccagccgcgcggaacccactcccccaccgtgggcccgcctcccgccgccagcctgcccacgattggtcgactgggctgcccgtcgcgagagaaggcggtgcctccggcaggccggcgctcccattggccgggatggcggcggcggcgcgcgcggccccggcgagcaggggaagccggtggccgcggctgcggaacgggcggaggctgccggtttcgtaaccgtcgctcctcctcgctgactcgcgggctgtgaggcctgggtcggctcgggccgcaccgcgcggggccgctcggagtggaggccgcctgggggcaggcgggctagaggagcaggtaaggaggctgcggcgggcgccctgagaacggggaggaggaggccgcggcgacgccggccgctcgactgggtgcgggcccggctcggggaaacccagccccggccccagacggcccgctggcccgggaaggccacgcgaggctggaggcgcgggcggcggcgccgcgcggcgtctgatgcaacctgccggcaacacccggcggggacgctgagctcattcctggccgcggcccagcgctgcggcgccgcccgtcgacccccgcgctgcccggggcgcccctcgcggcgggccgggagcgcgcgaacggccggggaatgccccctgcggagcccggccccctctcggtgaaacgggcgctgtgacccgccaggctcgcattggcccctggggatgaagggtgttcccagaatagcagaaggtggaccgagtcgagctttagaatcctgatcttctagaagggctcagcttgcggtgatcgaaaatctgttcagaagttcaaagactgatcaataaaatagggaaagcaactggtttttaaatgcatgactttgcagagataatattttgcttctttgtggagctgttggaatgtcctgcactttactgttgaacgtagtttagaagaacacgcaacacctacgggtcgaatagagaagaaatgaagcacttcgcaggcatagttggagggagcggagcagggccgacagccagcggaggtgaccagatgcgaaggatggaaatgcatgtgtcgcggggggaggagagtgttttccagggcagctggtgtgttgcttctcttccgcaggtttacgtgttgggttttcctcttgtttgaagtttatactgtaatctggcatcctgaaatgtataagatttagaaaggtctcaatgttgatgggtgacaccaaaattggtagttgtgtcagaattgactgcttatatgaataggttgtcacttaaggcagacttctcccaaagaaatgtgactcccagagaaaattttaaaagaaaatcctataagggcttgctttacgaagacattctacacctagaagctcttgatatttaagatgtggtcatctgttagcccttgagtagtatttgggataagctgttcataaggtcgattctgcttctggaaaaagttgctgtaaacaaggctaaataattacagggtacaagggagctgaagcatatttcagcttcttgattcctgcttttggtgggcacacttggctggttcagttatttttaatacctgcttttaaaaaaagtagatggaaacaaaacttcattgagaatatcctttaaattctcaagatcacatcatgtctgtctgcaaggctgtctgatcttggagagatggtttcatccctgggaaattaaacactatgtgctgagcccctggtaaagacaaataggacctcgtggggctgaatttggtctcgtggtctaagattgcctcacttggtcacagtaatggtaaatacaggtagccacgattccagctgtattgtgcgttcttgggagggttggttccatgggttgttatattgataggtacactggcctcctgcgtttgtggctttctagctctatcagtaaaaaaaagacaaaaatgagcatgacctcctaatggatgttcatttacaaatagtctatttgttttgtgtgttgtaaatcacttcaaaaggattgggttagaaagatgatgttgatgttcttctaatgctccagtgacccacttctgtactcccagaaaggggacgtccccttcctcatggaccctgcgctagatgcttgtgaagatctgcagggagacacgatgcggctggagttgacagacctagggaacaaattttcccagatgcccaaagaaaagagaaagcacagaccatttaggatacagatagtggtttagtactgtcaagatgtggtgtgagggaggagagagggtcaggaccttggatttgatcctgtagactggagccagagatgaattttcaccaggagaatgactcactcaggtttgagtgttcaattgctctggagacagaggttggaggaagcaggctagaccagagaccagtgtccctgagagatgatagtggcctaaggtgatttcgatgggattgggatggagaggaagagtagatgggaagttttttttttgtttgttttaggtggaattgtcaaatcccagagactaaacagagttaggaccaaggagaaacatctgtgactattttgaaatgttgaccttcattgaggaaatcgagtgaaaaatttattttggtgggcaaggggaggaatattgggttctaggtctgtggagaaaagggacaaaagggttaggaaaattcttgataggtttattttcccaggtgaaacttgagaaaaatttgattttgttttactcattctaacattctgcgctttcagtgtgactgacgtgaatgaacattacttgaattaagtttgaattaaaacaaagcctattacccacttagtccaccattctcaatattcattgggaatcagcagcagaggccctcagacttcagtgtattcagagttacttggaggtctccttatgaaaagattactcagctctgttcttagaactcctgattctaagtctggggcagcctgagaagttacatttctaaagagttcctggatgatgatgatgctggtccagggaccacactttgagaaccactgctcttcagctttcctgctgtttcctccttgagtgattcacatggaaggaagccaggcgccgccctgcatcctgtagcctgaactttggaatagtgtttgtccacagaggagccagacttgaatttaggactgagtgtccagctttcaaataaacactttttgcctgttgtaggtgttcagtaaatgtgtgtggaggaacaaagcgtaaatgagagtggccttttcagtgtaaaatcacttagctctttgatccccttttacttggttaatcttcactttaagagctatttatatggttaaagaacttactaaacaaaacattcttggagttattttgattatctccaagtttctctttcttacattttcaccagtttgtaggttcagtgaatactcttttcaggccaaagggcttacctttaaaacctcacctaccacacacgttcagcctagtaccttgcaagatgagtcaggcagaggtgaaaaagcccttccctgttcctgtatctttggatacggaaacaggcgtgaacgttgctgaacgtggaccctgtagtgagtaagagctgtttgttagtgactgaaggtcgtggtgtgttgtctgtaggaaagtgtcttactattccacatccctcatttgcatgtggggaacagacagccatggaagaaaagagatttgcccaaactaaaatagggggagccacagccaagacaagaactggcctggtcactggtctctaccgctttggatcattgctatctctgagcatggacaagttgactgtagagagctttaaaggctaaaaatataattggtatattaaaaaaaaagtagagaaataaggtgaacatgattatgattgttaagacagtctcaggggaggtgttaaacaagttcttaaaaattgagtaaagcacctctcacttgacaccaaatggataataataatgttaggtggcactaaatgtggctcagattaatactaaacagccacttttctactggaagaaaaatgaggcaacctaatgatgaccaagggaaattgtgaactgtccattactgaagataggcttggagtggatcgccctcatggtttggagggatgctttttgtcttgccttagtgttggcgtgagaacagatgacctactagctcagagtcggctgtgtggctttgaaaacaatggaaagtaatgacacatggacttttcaaagcaaagatgttttttaaaaagagaccaataaacagtgtacagaattgcctggctgaaggtttgggtgtagctactggtgtttgctaactgagctttccctcattgtgggatcactgcataaatctgactccagattttttccactgatgtgattttagcagttttgtgaaaagagaacaggatagttttatgttcctaacactgctttctaaatttctaagagtgccctgattccttggtggacaccgttcactgaacttagtttgtcttgaagtggcctcatgttgataggatagtcacacttttacacttcttggggcagctgtagggacttaattggattcagagtaatccacatgtgactgcttttcgaaaccgtgccttcatttctgcaggcagcagcacagggatgcttcagagctggtgcgtcctccgagctcacacgagctcatttggtagcacgaagtggccacaggcacggcagctgctcagctcctttgtccagcctgggtcccaggacccgcacttccttggatgcatcatgagggcttctgtttctttccttgtggtttcaggttgagtgtgttttgagttttactaattatgtcaagaagaaaaaacacactttttacaagcttggtgggatggggagcaaattgagtgtcagagctcctaaattcaagaaactgactcagtaaatttggttaaactgtggaattatcatttgaggtcattaaaaaaataaagcaaaaaactaccttttcaaaatatccgatgaagagagctctgggagagaactcaagtcctcgatgactccctctctgcatattagaacatggaacccgcaggggtgatagcatgagagcgctggagacagggtgcgcaaccccagccttctgttttgacttgaaccaacaatggaaacttttcccccctttcattgcaggtgtctctcctactacagtcagctgcagctcctccctgggagattgtcaagtgctgttagttcacatgcgccacctaattagtggaagtcttttgttttcctcccatttttgataacaatcgcagaggggcagtgccctcagggatccaggtgggctgagtttcgcctgatggtgcttctgtgcttacttacctttctaagtgaaatgatttagacttcagaaacattggaacagttggcagttgctgtagacttttctcagcagaatcaattaatgttggcctgatgttaggtacgtacaagtttgatctcatttgatcctgtcatttcaaatattttaatgcaatttattttttaactaggtacatgtgaagattttttggcagcttagcgtggaaaccattgatcaccctgctctcatttctacctgttctgtgttggcaagggagagtgcccaaatgagcaagatatcgcagcaaaacagcactccaggggtgaacggaattagtgttatccatacccaggcacatgccagcggcttacagcaggttcctcagctggtgcctgctggccctgggggaggaggcaaagctgtggctcccagcaagcagagcaaaaagagttcgcccatggatcgaaacagtgacgagtatcggcaacgccgagagaggaacaacatggctgtgaaaaagagccggttgaaaagcaagcagaaagcacaagacacactgcagagagtcaatcagctcaaagaagagaatgaacggttggaagcaaaaatcaaattgctgaccaaggaattaagtgtactcaaagatttgtttcttgagcatgcacacaaccttgcagacaacgtacagtccattagcactgaaaatacgacagcagatggcgacaatgcaggacagtagacctcaccctttccagactttagagcttgtggcttgaatgttaaaggtgtgaccaccgacaccactcatgtcaatggctgaaagttgtccatttccatgactcaaagacccattggaggctattttctgggatcagcactgaagagttgattagctaaaaatgttagccttgtaattcgaatatctggttttaaatgatagaggtttttgtgggaatcaaaatcccccaaatgttaaggtatatggtaaaaaaagaaatatctgggatcccgatgttcttaataaatcctgacttcccaagaaatgcttcttttttaagttgacaaaaggaatggggaactggcaggccgcgcagaaggttcttggttttaatggataggctgaattggattaagaaaagttgaatgccacctatggtaatctatttgtgattttcttctaaattatgtattataaattcgtagagctatagaaagcaatgagtgtgtaatttggagtgattttatatatggcataaactttgttttaacataattagtactgttttcccccaaaagtacaagtttttgagtagcaatgtcaggttaagtaaagaaacttcatcacatcttataggtagtgtgtggccaattgacttaaaaaatacaaataacatttaggaagcaaatagattaaacacaaaaataaaactaaagcataggaattatgtttttgagatacctttgggcttagattggcattgttttattctaaaaacccaactcagtggtgtagagaaacttgtgtaccaaaattttagtttctgcagatgctagtgtttttttggatacaattttgacaaccaagttagtaaacaaaatatcttaacagtttgatgacacaagctactgatgagggtttggaatattaattcagaaggtagtttctcttgtgttcaaaatagctgccatggggctgttacttttaaagtcaaaattttcttctgaaggctcattttggtatttgatcttaaccaagtgattattagagaaatgtatcaactccatgccatctcccaaaataattgtctaagaaaacttgaaagtgtaaggttttaacctttaatttatttctcttaaatacatcttttgatattgttgttgtgacatttctttttctggttagtgggctttccagactttgtaccactgcttctgtttattcatttatatgcttttgtgtcccataaattatttcagaaaatgctgataaaactcaggatattgacatttttgttgagactaaaaaatggcagtcgctaaagtagggactctagagtctggcttacgtcagtgttggtagtttagattgtctttgtcaacgttttttcttctctcttttgctttcttttctttctctttttttcttagcacagttctagctcaaatttgtgtattttttgtgtgcctgggctggagatgagagactgagtcataactgatttaaaagtttgtgttatcaggtatcttatttgaacatggtcatttttggccacattgctgtttcatactaggacttgggatgatgtagccagaataaaactcaagttgcaccctccggttggtggaagattgctgaccgtgccgtttctgggcaggagaagacatcatggtgtccagcaactcagcaaagccattcttaagagtcgtgaggtccttctgaatgtaaaactggagcccaggagaagctgtcccaggagggctgttaactccctatagagccaggagacaggataggggtttctagggtccaacaccagcttaccttggagtatgaatctacccatgaaggatgagagatgttttgaaaaactagccaggacacacccacaggatcctactggctccttagcagctgattggtgttacataattaacttaattggagatgcattaggtcacttgaatgtataagcaagcacctatggtaggcgctacagacatttaaatctcttgggaattcgatgctcccatggaatttataccagttatatgaattgacttaagtatcttgaaaaagaaactttagagaaagcatcaggggtgtgtactcagtatttcaaatcagaacacaagattggaacttttggaaaaatgggttcaagctttcctattagccatggaaatgcaaagtttagcagaagcaagcaattaggcagagaacaaaaatgttaagcatggtgttgtctatcttattgaagtggttggaaatgaaagcttttaatttgatagatttatcagtataaaattagggaaaccacgtgtggggaatgaatcaatttagagcttcgggaattgtgaggtgacttttgtaacttttgttctgtgtgtgacctgtgaaccactaggatgtgatctgcccttgtgggcaggtccagcatagttaggagttaggctttagcataaatttctagctgcatctgagtctcctgggatgggtgctctttggctggttttggctgcggatggtgagatcagagcagctcttcctgctgctggcccctgcaatcagttgttgggatgccagtgcagatcactaagtagtaagattttaatcaaacacgaccaggtccgaaatgcaggtcatgagtgtgaaattctcaaatttacataaaaagtagaagtatagacagtttaacatttggtattaaaggagaggaaattgtagcagcttttcacgtttcccagtccccattagagggcttgagaccttgtacctgaacaacccattttgcactcagtgctttctgatgccttaggagaattgttttgtttcacaaaagctgggaaggaagaagtccattctgcagctgttagatctgcctctcaggaaaaagtactaacttgttctttttgttcctggctttcatcagtttgtgagatttctctattttttttaaatataattttatttctttcaacaaatataaaataaaaaacaactttggaacaatgacttgtctttcatcgtggctttctttatattagataccaaaaagcagtccagatgttaaacagctgggaagcccaggcaggtgccttgctgtctttcctgttcccacactggacggctgggggtaggggtggggaaagtggggagacaggcagaggtatttgtgtccaagtctagatctccccgtttgcccttagtggataggaaaatagttttctctgaacatgggatacatctttagttatatttttagtcacttggtctaaactaaaaattataccagaatagggaaaggaataactgaataaatgggttcccgcttaatcacctagtgtctcagaacatggtttccatttagagagggaagaaattcttatgtttcgagatagatagtcaagaatttaaagtaaggcctttccccatctggagttttgtagtacatgtggacactgtcctcatttacgtcatagagtgtctgtagagatgaatttgctgatttcataaactgttgagtccagggagctgatgtgaattgaatatttcaagggaatgccatttaaatgcttttcttctctgatgcctcaattattttcatgtcttgggaaataaatctctgcttgctgcatcttaatgaaaagtggaggtcaggaattatttctatgggaagtgtggcccgtttcacttttttgaattagttgtgatttagaatccaataacgtgtcttggggaattttaccgagtgatgacatctttgtgaggggggccggtctttttctgacaaaagcacttttagaccagctcatccactgcctgtgcctagccagagagttcataagcgttttacagttttacatacattcagagaacaccattgcctaggtattcttttactgcagtatcccactcctcacagagctctaggcctgaaagctgtatagaggcatctagagaaatgggggttatagaattggacttggaaaaggaataggattgtcagtgaaacagtcacgcgttacactttttgcagcccaaacgccacctcttgtccctccctgtaaagaagctgttaaaaccagatgcgcttccacatcgccacctttcacttccaccttctaaatggagctccggtacctgtctgcttcacccaccccgacccccatgcagagccatcctcttcgcttgcctggacttggtgactggctcctcgttggtgttcctggatggcagcgtcactgcctgctctccagaaccatctgttgctccccattgcacccggggtgagactcagtctccttgtgtcgtggcgtttcccctcatcaacttaatttccctccatcctcctgtgtcactctacttcggctctagggcttttccaagctcttttctgcccttcctgggacagctccttctgtctggaatgaagcatctcctctggcttttcactaacaagttccctctctgtctcagccccctggctgtctacgctaagcctatcctgttgcttgcttcatggcactttgcagtgtttgagacaatatatttgttcatgctggtttgaggtgaaggcctcgcagcagactagaggctctggaaggaggggtcatgtttgtatcctgcactggcagagtagatgctcaattatgtattgaatgaatacctagacactgagtttcagaagggttgtagcacactatacagctttctggcggggtctctaatggatttctgaagctacatgaatttctgcagaggttagaagagacagagttaggtacaaacatgggggtagcggaggtagctactggggccctctagacctgtgcttccaaagaatgccctttgagacaggtggagactcacgcctgtaatcctagcactttgggaggccaaggcaggaggattgcttgaggccgggagttccaagaccaacttggccaacatagcaaactcctgtctctatttattaaaaaaaaaattttttttttaaagagcaccctttgacctactggctcaggaaaaacgtgacctctctgttcctagtgaccctctgaaaagtgtttagatagaaataagagatttctccttgctcctttttgttcacttcttgataatcagagatgtttatgtggaacgggcagctttggtatggaatgtctgaaaggaaggagaaagatgtatggtgcactcagctctgtttctcaattaacagaactaaactgtccattttgagcttcatcctgactttgagtggttttatcctgaaagtggtggaaattaaagccctgtacaccagactgtgtctgtcacaggggaacaggggtggagaagtgcttggtgaactcttcaactttccttacactcagaagatactttttttttttttttttttttttttttaagagacagggtcttgctctgttgcccaggctggagcgcagtggtgcgatcatagttcactgcagccttgaactgggctcaagcgattctcccaccttagcctccagggtaggtgggactataggcgtgtgccaccacgcccagctagttttttatttttactttttttaagagacgggatctccctatgttggcccaggctggtcttgaactcccagcctcagacgatccttcagccttggcctcccaaggcatgagccactgcgcctggctaaaaagacataattgctactgctcaatgtcacagatggatagcttagggaatgtatctgtaccagcagaaaaccttaaagaatggatgttataaatctaagaagcagataagataaatggtgatttggaactgaaattggcttttattttaatgtgaccactttataagcacttctgtgttattaccataggaagaaatcagtttgtattaaactctttggtgacttttttttttttaaaaaggcagtcttgctttgttgcccagggtggagtgcagtagcatgatcttggctcaccgcaacctctgcctcctgggttcaagagattctcctgcctcagcctccggagtagctcggattacaggtgtgtgccactacgcccagctaattttggcatttttaatagagatgaagttttgccatgttggccaggcaggtctcaaactcctgacctcaagtgatcaaagtgctggaattacaggcgtgagccactgtgctggcctttggtgacttctgaaaacgtctcttaagctacagttttccaccccctcatcctcatggtttcatctgtggcatccttctcacttgtcatctttcaccttggcttgggaactcttggatgggagctctgtgagaaggcaaacctggaatggtgtacagaattctagaaaccagctccaggggtgggctgttctgcgggaccctgggagaactggacaagcagaggcaaggacagatacttcaccaggcatggctgggccctggctggcttcctgcctggtagaatttgttcaaggactacacttagggaggacaagcggtctctgcaaattggctgtggcgctgccttcgttggcagtgtctccgacagatgctggctttggctagtgtgtcccacatgaaaaagaaatcaaggacaagagatccctgcaagtctcaggttttaaatatctgcagctcaagcgctacatgattctaccaccttcagaaatctagtttggaggcagtgaccgtatcagaaagacttgtgttaaatcagtccgccctttaacttgcgcaaaggcatggcgcggggtgacttggccagtctgacctgagtgcctaggatcttcctgcagcgttgcttgccccacctcaaacctcgggctgcgctggtactgacaagctaaaaccaccttgcctaggagtacttctcacacttgtctgtcaggagcatctggcgggcgcttgtgaaatacacaattcctgggccattgcccctagacgttgggtcagatggtctgtgggggtcccaggaatctcttaccaaatgccccagtggttctgatgcctgttaggcttgggaaaccttgcagcaagtgacagggtgacaccagagccccgagtcccaggggctcaaagcaggctcctcggggaggactctgcccttgtcccgccaggccagtctgaggcagaagcagccgttagagggcctgtgctgccagcaccatcttcctggaactgacttgatactgacaccaggtgagccatcttttcagggtgcacggggtcccaaatgctcatctgcaaaggaataaaggggaagccacgcacaaaggaccattttaggaaaccttttattgcaaatgccattctgcatattgatttttgacagaaagtatcagaaatgcttctttcctgggaaaaggaatataaatgacagcaagacacattttagttgctactaaagaacagcattattttcaatcattttaagtcgctcatttaataagcaaggtataaaacagattaaaggtgggagcctgcaaaagggtaattaaaaaagtgtttcctccccgggaaacagcactgtttggtctgatcaaatgccgaagctgggatctgattctgggtgccgtctctcgctactggagtgctgaccagcaggctgcccatcacgaaaagaggttgcaaggccaggcccccaggtgcgctgggatttctggctggctctacttggggccagagaagggggtaaaggccttgtcacagcctgccatgcatgcttcaatctcttccacagtgcggggcacgcaggtcagcagctctatgccgctgtcagtcaccacgacgtcctcctcgatgcggacctgggtcaagccgacagacacacattatcatagagcagcctcatgtgccaggctagagggccgggcccattccaggcccaccccaccatgggatgggagcagctgacactccctgggagacgggtggcctccgggctccttcatggagccatctgcccatgtcacctgctcaccctgtctttgccaggtggatgggagcccctggagcgggcaggggttttgcaggatctctgtctgttcctactgaggggtgaggctccatcctgtgacagaccacacgaaggggcaggctaagcccacctcaagggaagatgtcactagggcccctgtcttgggactaaggagtctgcagctgcagtggaggtggcagatgttctgggagcaagaatggggcccgtgggcactcaccccgccaaaaccgcgaaagcgctgcaggacctcgcggttaaggaaggaggcgcgggccgggtccgccagggcctcatccaggaggtggtcgatgaagtagatgcccggctccacggtgagcaccatgcctggctgcaggtgccgtgcagtgcgcaggctccgcaggccgggctcgtcgatgcgctccacgccctgtggggaacagaggtgaggggcctgatgagcagctccagggctcaccgtggcctcatcaggagagatgggcatgtgagggccggtgccagtctcgtgggctctcttgaccattggggtcctcagcctagactcgcccctgctgtgctgggccatgggcaccctgataagaccttccaccctgcacatacccctggatcttgagtgtccctggccacactaccctagggcttgcttgagaagccctgtggccacccatgtgcacacacccggggcaagctgcccagacaggcctgtggggctggctgagggttgggctgcccttagccaggccccgctgctggccagaggagtggcagatgccaaaccactgaagccaaaaaagctcttaaggcggctgtgaagccccttggggccacagctttccttccaggcagcccaagtagaaactggccccagaagtcgtggtcccagctcccctaggccgaggcccagattttccgtgtgactgtccagggaggacaggtgccgtcatcagggtgggtctgccagccttagtgcgccagtgcaaatgtgccgtgtgcgcgtggcttggcaggtgtggctcccagaggagagctcggggccttacggcagggccctgggaaatagcccccagccttggagaacgcctgagggacagtggtagagccgctccctgcaggggcccctgtctgcgccccacactgccccagtgcacacccagcctggccttgtccactcacaggcacagctgagggggcctcagcttggctgagggcagcgggtgctctgggaattacaggagagctcctgctcgcctcaggtccccggggcaccatccggccggcggccagggcctctgagccagtgggcacgagtatgctttctggtcaggggatgagcctgccctgcccggctgcactccctccccaggaagcccagctgctggagcgggagctgtcatttctgactgtttgggggccaagaacatcagactccaattagcagttcacgtaaggtaaccagaaacaggctggctcggcctccacgctgggcacggccagagaggctgtgactgattccacggagggcagggacagccacgctgacctggagagagcaggccaggcgggaggcgatgaggagacaccacagcctggctggtgtggccccggccccacaacacttgcctctgggccgctgaccgggagctgaggccggagggcagggatgccccgtggctgaggaaccgtatggagtgacagtccctctgcgcaggtgagaggtgcatgtggaccgagctggggcctgtctcctgcccagaagctgctgggggtcccagggtctctgctccaggaccttcccgtccctgtcatccgaagcctgtgctgggctcccccaccccaccgccgcccatccctctccttcatgctattcctgaagtgtccgtccctgtctccacccacagcaatcgaagccaggggcctgggggaagcaagggcctgccaacgtcaggtttccttccttccagtcacccctccatccccatgggcccaccccggctgctccatggtacacggttgaggggcaggtttgtttccccagagaaacgaactttcctcccctctgaaatcttgaggtccaccactgaagtggggtgggggagattagaagggatccccagcgggcacagggcaaggcctgcctcagcccagtggcgcagctgccccttcagggtgttggctctaggggcctgcccgggggacctgctgagaacagggcgcaggcgccataagagaatgggaagggctgggccgggtggagcgcagagccatgtggggagggcacgagcccctgtggcccaggaagcgcagccttcaggggtggggaggggtcctgccctcaccgcgcccatgctcgcctctgcctgggcacagggcttgacaaggcctcaacttttattgggctccaagcagaggagccccagatgtgtctgcaggcctgaaataaaacaaatgacttttataggaaaagccatattttttccacaatgtttatctgtcagaagaatagactctgagcacaaagaggtgcttactggaaaagatgaaaacagtttgctgccaatttttgctggtggaaaaaaagcgctttggcgactaatgaataacgaacctcagctaacaatgtctggaaggcccagctcttggctccctgcacacaatgggatgaatagacattaggaaattaaaactgattttgtttctccaaatttaactgtttacacttgaggaaaaaaataattgaataataatgcttctcttaagcaattccccccactgcccccaccctgccaaaaaatcattcttagtgctttcaaaacaccctgcagccaagaggctgagccttgtcttggctaactggctggggggccccagggcgtgcacgattgcacaatcagccccctgcattgggcagcccgccaagggcagggatgggagcgccccagccgcccagccgagaggccgtagccacctgcccggttgggcctccccaagcctcacttaccctctgggtggtcctctgagggccggggaaccttgtctggagatggcccccagcctcccttatctgccaacgggccccagaatgcctggggatgaggaggctgcagggtcccaggtgtgcggcccaggggcctgggaggagagggcgaaccagcggcagagcagggctgctccgggtttgtgaggggccagggtgagtcgccagtgggtggggcctcatcaactccccacgccccaggtctgaatgaagccagaggcggcaggacgtgaggggtgccacgtagctccatcacgaagacctgtccttagcaccactgtcctgtggggccccatgcaccgtatcctgactgtgtgccaccttctggacaggtgacacctgggcccagcaggcagacagcaccgcctctatgtccagttctgtggaatgctcacagatgcacccctgtcttggccagggtcccgattcccccctcctcatggcctccgtataccacagggagccatggggcccatccctgccatcccaatacacgcctgctgcctcctagagtcccaccctgccctgggggtcaggctcagcggcagctgatgggcaggccactccgcctgccatgtccacactgacctctgggtagcctcccacgtcgtgcacgtcaatgcccaggaagtggccaagcccgtgaggcataaacacggcccccaggtgagcctggaccatggcgtccacgctgccgctcaggatgcccatgtgggccagctcctccaggtggatgcggtcagccaggcggtgcatgtcaggccaccagacacctgtgggccagagggagctgccgtgagccacagagcccagcagccaacaccgcagggccaggggctgggagatgtgaagccctcacactggctgtggtgggagggcctgaggtggggggtgagggggcaagggtactacatcgggggcccagggggacaaggactagggtggccccccgtgctgggctttcccagcaaaagctctggccctcgggacccttcttgtccctccattctgcctctaggggcaggttcctgtcacctgtagccaagggcccagcctgggtctactctgtagcccatggtgtgtccaccctgaacagcctatgcttctgggcccagggaaacctagccaaatccctgggcaccaggagaaacatgcacgtctccccagtagcagacaccaggagactctgtgggctctggccctgaggctcagacccaaaccctggctcagagctccgatggggttttgctgctgtggtgcagtggggaagcccgaggctgaaaagaggggtccctgcacatcccagaatggggatgaaacacccctggagctgctgcagggagcaaaggtttctggggagaaggtgcggctggcacggccccacgagctggctggcaggggttcggggccccgcctgccaacagcaggggcaccatctccaggggagccagatgtccaactcccggcttcaaatccaactcatctctgccgcatgtttgtggggcaaaggccaccaaagagagaacttcctaagcacagagctttgggggccacacaggctctgtggggctctggagcatggccgctaggaaggaggcccttagagagctctccacgtagagcctcagcagcccacgggtgcgcccgtcccatccccggactctgtggaatcccagcatcagcctctcctcatggtagcttccactgctggacttggcttgagcaccagataaggactcgaggccggtgaggcctcctgccctggccccatgggggctgggtttgggcaggccacgtgctggcagaggccggggccccaggacactctggccaggcacgtggcggggggcccctatcaatgtgcagctcactggctggagagggcgcccagcaagtccctgcggcacctcctggagaggtccagccccaccaggcggagtgaccttggctcccgagggcctccctgccaggcttgccttggcgcagagccagagcctgctctgcatggtcccgatcactgctgtgggaggggccggggagaccctgagctggcgagggctgggctgtgagaagcagggttctgaacctctgtggctggcggagggcagatgatgggctcggctggcgaacagggatgagagtccacactgggacacaggccatcacccccgacacactgggcacaagtccttcatgttgggacccctttaagtgccagagttggccactgtggtgctggggtctcaggcgggctgggggtgcacggctttgggcaggcagtatggctgttgcccgccattcacagcacagcgccccagccacggcagcagcctaagggtggcaggggtggagatgcccagacctgcccccaccccccacacagagcagggatcctcctcagagcccagctccccatcagcccagcctcctaggggctgaggtgggggcggccgtcccggggtctggggtctggcgtgggggaggccgtcccggggtctggggtctggcgtcggggaggccgtcccggggtctggggtctggggtctggcgtgggggagggcccggggtctggggtctggcgtgggggagagcccggggtctggcgtgggggagagcccgggcagacctggggcaactctggctgcagctgccctgtatctggggcagccctgggcacacacacccctggctggcccagcccgcacccctggcttttctgaggggcacaacatcccggaaaaggacacctggataactgcagcccacttggccgctcccccgcctccgtgagcctcagctgccgctggtcaaacagccccacctccgtgagcctcagctgccgctggtcaaacaaacaaacagccacaaggcaggccccggggggttgctctcagagcctctgtgtcacctgggggctggaggcagcaccccggacagtggcattggccaccattcctccatcgcgcatgaccagccagccctggttccacacttgacattcacttgttcctgggggtgtgcgccaagcctgcccagcctctgctgctgctcttctctgagaacccagcccggacaatcctggcccacctcgcccttcctctctgctgctgcatcctccagaggccagaccaccccaaggcacacaggccgttttacctcaggccctttgctatggcctgtgccaggccttgacctgtgatgcctcatccaaggggtctctgcataaaagctgtcccctctcagaggagaccttcctgccttgctgtcccaggcctggtgatttctccttgcacggtccatccagcctgcagccgtcccctggacggatctgctcgtttgcttctcatgtctcactccgagggtgggggtctcccgagggcaccgctgggcctggcataaagtgagtgcccctcaggtctcccaacagcctgcaaagttggcacatggggctgggaggcctcctgtgagtggctcgtgccccaagcccagctcaactgcttcctctcggacgcgcccttctctggtcaccaaaggggagccccgggaagtgcagccagctttccaaccaggctaacttcagcagtgggctacgttcttggcccagcctccgcagagggcgggaatcaggtataaatcatgctctgcggtggcccttcccgggggcaggcccggcgccgcccagatgtgccggcccgggggtccccttggcgccgctggtcttccttgcctgtgcaccctcggggaaggccttgcacacagctctcttggccgggagcagggagtttctgcctgtgtgtggttagggttgtgacagtgattcaacctccagcaacttggccccagcctctggcccggatggtggttacgacacccaccgcctgggcgggggcccctggagtgtgtgagggtcactgtccttgcactaggctggcagggtgggcaccaacttgagggttcccttgctggcctgggcccactctcaggctcctcccaccctggcagcctggagacaccgtcaagctctctagtccaggctggaaggcacccccggcccctagccagcctatacccagatgccacactgagaatcacacagcagaaattgggcaccagctgccctgcgtgccccaacccccagcaagcaccaaacctcattctggctttcccgaagcacccctgcacctgccccacccctcctggagtctgcctggctccctcctccgctgcacaccccttggatgcctgggccatctctttagaacgaacggggcaaacagggccattcccggccccggacgaagcccaggttctcagcttggcctggtctccagcctctccctcacccactcctgggtggggtggctggaccaaggccacgggtcccaagaactggccctccctacctgctgtttccttagctggggccacctcctccaagcccgttttcccagatgtgctcccattcctcctgtgggcctctgtggtgaggctcctcctccaggaagccctctctgattaccccttcctgtactttgagaattcacggaacacacagcacagctgggcctggttatgacctctgggccttgcaagggtggtgcccgtactctgctctgtgcctggcatgctgcggatgcttggtaaacgcctggaaggagaggagccccagcttctctcatggctctcctgcagccagtgttgtgccccatcccccactcctctgtgtactcagaccctagaacgggcagggtggcctctaggttagtgtcccatcatgcgcctcatgaaatggcagggctcagaggaacaagccccgctgctcctgccacccaggccccaggtgtggccagcgtagcccctgagtggtcttctgggtccacttggtctcctcaggcagcacccgctcctgctgggcctagggcccaggccagctccttggagcctcaaagcatccatcacagccccgaggcctcctacccggagtgtgacagccccagggggctcccgggcctgaccgagctacaaaggcagcatcctcagagctgcctccagacaaagagcgcacttcatctgtggaacatggccctcgggatggatgggtgtgagccaggctctaggggtgtaggacagcaggctccggccggggtcccagggcaggccctgagggctggctgagctggcacggggctgaggacctccagctcaccccaccctgcacgggacgtgagtagaagaaccccatctgctgccagaaattctggggacccactcaccctgcgtgagagcagggtgctgtgttggcccaggctgctcctcgagtctcctcccccacaccctggcagagtgccccgaggagtaagaagaggccaaggaactggctcaccattgcggccggcaggaggggtggacatggtgcccacactgaagacagtcctccccgtcctggcacctgccgcagagggtatctatgactggggtggcacatggccgccatgcctatctgcctgagccctgcactccacgccgtctcggaggatgaggactgacaggaagtctagctgctgggcccctgcccctggcgctggctgggaggggagcaaagctggcagaggtgccccctgaccacggggccacaggagacacatgccaggtgggccggggcaggtgctgctgggcccctctcccagccacctggtcatcccgcgcctcagtgcccctctctcgccccgtcaggactgttttggaggtggggacacttcctgccacttctttcccctcctctgacctcacattggcagcacccccgtcactcacaagtggccaggaccctgagggcagggacagagccaggagcgggggaacgaaacacaaaagagctcatgaatcgtgggccaccattgctgttccaggttgataggagctgggcccccagtgacaggggcacaggaggctcctgggtgagcacaggaaagagtagagaaaggcggggaggccagggagggtgggggggtgaggagagagggagctgggtcggggctgggaggcgaggctacaggaggctctggggcttgcaggcggagggcatggggccctcagtgctggggtcctctggagctccagggtggctgcagggactgagcccgcgggacagggacagctgtgctgcttctaggaacagccttcctgctgtggctgtgccaatgcagaccctgactcagggccaccctgccgggctcgcccatccgtcccagcagcgcctccccccattcccctcaccatgcatgcaggggtctgcatggggtgggcagcctgccccaacacaggagccgcgctgagcttggatcccacccaacctcccgtgcatggcactccccgaggtcctgcagctgctgggcctgccctgccacccgcctgtggactcccagccgccagggtagggtctccgtctgagcgagcgcagcctccttcctcgccgactgtgaatgacagtgaggaatgctcccccaccagccctaggatcaggggccaaggcctgcattcctcaaccccccagggtcctgaccattctttcctgcctctcctttgggcttagctatggggtttcctgctttatttactctccctggaaggtcacaggatgcagtcgggcagtctcggtggggtgtttgtcttggcccaggaattgaacccacgaacccagggcatttccgctgggacaaggcagggggctgacctggccacggcctcctcgatgctacgggaggcgacctgccccatccggagggcagctctgtgggcccagggcctgccccacgggccttcactgtgtgtgatccagatggagtccgactctgcccttgggggacaccaatgccacacagctcagtgtgggtggtaggtgtgggggggctgctggggggctgctccattcccttacacagggatcctccagaccccaggctgggtctgggcagcaaagcccagtggtgggtgggagcggggctgggggaggacctgcctcccatggtctgagatgagcctagctggatttggccttgtggccccagacacccctgccaggcctgaggcctgtgcctgccccaagagtcagcatgaaccaggcagcaccacgggatgggagacccagctcaggcctttctcagtgccacatggggcctggggacttgccccgaggtctggccactttctggacagaattggggctgctgagttgggccagggagctggccaggatgccagctgtggagatgccacccaggtcctgcccaggccgcagcaggctttcctgcaggtgaggccagccagggctgggccatccctggtttcagcacaggagactgaggggtaagacaatggctttcccaccgaacaccccccaggccttggcccctatgctgcgtcaatccgccgccctgctccccgtggcctggtgctacctctggcaccctgatgggcccggcactgcctgctgaccaagctgagctcctcagcctgatgcttgggtgtacagggttgctgggcttggtgggcccccgcccctcacaggctgcaaagctctgcttcgccgctgggaggctcagccccttgcagcctggggctctgactttctggacatctggatttcacgactgcccgtggatgtctgacactaccacttgatgtgatggtgacacagttcgcaatgacacagcccaccttggcacagctacagagtgggaggccagccctgtacgtgaagggtgtctgagagactctggcccacctgagaggctgtgcccggcggagggctctccgtggagggtacaggagctgggctcacagatactaggtgaatacaccacaggccacgctcacctgccaaatcctcctgctggatctgaaacactgatcattcattcgagtgactagtggtatttaaaactgagcaagaaattctcatccccagaatgaaggaaggagaaggagtggcgcccctgggcgactgcttcgtggaggctggattggatttgacagctaacgggggatgcttcccatggctgaagagtcagaaagaataagaagggacgcagcaagcaaactgtcccgtcccttcctgcacctcctttatggttttcacaggcgcacgggaattcacgctctcactccctcttccttttacccacaagggcccgctggccataccctctggcgctcttctgtcctcacccacccatctgcctggagacacctgtatattcatactcaggggtggcagctcctttttgtttgttttttgagacagggtctcactccatcacccaggctggagtgcagtggtgtgatcttggctcactgcaacctccgcctcctaggttcaagcgattcgattctcgtgccttggcctcccgagtagctgggattacaggcatgaaccatcacgcccagctaatttgtgtaattttagtagagacagggtttctccatgttgcccatgctggtcttcaactcctgacctcaagtgatccgcccgcctcccaagtgctgggattataagtgtgagccacagagcccggcctgctgctttttaagcaaagcaattccgcagaaaatgctgttttcctcggcagctgctaaaccaggtgagtccgatcagcgctgtcaccccatcacaagcttattgacttttggattttctgtcctgtcttccttttggggcacatctggggtccccctgcttgcactcatgcgtttgtcaagctctgttcctgttggatgcgtgaaggtgtggggctggggcctggcactgcccccagcgtccctccgcggctcctcagcctctggtgggggctctggaggctggactgggcaccatctgcaaaggcctgcccacagtctgcctcctctgaaagcgacggtggctgagggcccctctgaagcacacttgggccggcgatcgaggctgcaactcatcccagcaacgggctgtggggccgcagggactgctcagtcgaccgccgagccatcaagttctgaggccgcattctggaggctccagatctttctttcttcttttttccttgaacactgagggcgcacttggcagctgccagctctctgtgggtccttaacagagggcactccatgtctaactagatgccacggtccagagctggccaggcccgctctgaagtggactctgccttgggagagcaggggtctatccttcgcctgtttggggcttaagtaaggtacctggccagcaggcggcagagctggggctgggctcggggcactctgggtctggggcctgcatcctggactctgaagccttgcgctactgggctatcccctctgcccgcggtaagcccacctggctcctggaggacgcctgagctcccctacacagggggctgccttgggcctgcctgtctctctggaggtctgtatagctgtgggtgagaggcagtgggcgagggtgggggcaagctgggggggctggactatgacctgggcatggccaacacgaggtgatctctgacctcgacccagatggagggactccaggctgcagaaggtggctggggcctgtgtgctgagggcgggccctggccagacgatccagctgtgagtacagggccattgtcctgtgccactgcagccctggccccagcccagacctgattttccacctctgtgaatttgtggcagccccaaatgaccgaattggctggagactgttctgttgcttataaccaaagatgcagaacctgcgtgccttggggggccagctgtgcctgggccggtgtgggcagggaaagcccctctgcgctgcaggctggaccctggcagctgccgaacagatctcagtcagagtcgtgggagccatgtgcctgtagagggccaggcctaggggttggccagcacatggtgatcccataggaacctgcccaggctctggtgaatccaaggattacggcaggggtgctgtgttgaagccctggaaggcttgaagcaagaacatgagaagaccacatccctcaattctctcctctgggcaaaggtgacaagccaggacctcccatcactgctgggaaatggtttctattgttgcagggcagagagctggggttcgatcctgtgggtgctagactccacccctgccagggctatggaggacccaggggtcactcggcaggaggctggctgagcgggatggggacagcgggaggtgcccagggggaactcctgaaagctggccttgttgggaggatgctggctcccctccaggggacctcctctgcctgccctgacagacatcaacggcgcgcggtgggaggtcaagaggtaccagtggggcctgtgcaggctgcctggggttgggagggctgagggcaggacaggttggcctacgctggccgctgggagagagaaacaccaggcccatcctggcctcaacatggccatcatggtggtgactgtgacccctgcagggcactaccacaggccaggcggccttgcaggtgctttacacagcttaactcagtctccatgagtcggctgcttccccatttacagatgtggaaacggccacccagaggagggctttccatccaaggtcacagagcgctgagcggcacgtgaacctgctctgaccccatgccagtgtccagagtgggttgagccctccctggagtagacaccgcttaaggacaaagcaggagacaggctggcgtgctagtggccagtggagatgcgcaggtggaggccagcagaccggggagccttggcctgagccccgcaattcctggttctgtctgtccctgcctggtggtcagccttgtttcctaggagtgaccctggagacctgacgccactggaatctcagggactaagcatctggagtgtggcagattcaagtcacacaatgcagacccgttccctgcaggcacctgccacatagcagcgcccccaacgccacgtcagatgcgcctccccccaccgacccgctgctcacctggcttcatggcacccatgacggcacgggagctccgcagcactgcctcatagacggccttctggtctgcagtgaacttgccgttggcgggaaaggagcaggtgatgtcggaagcgaagcagtaatactcaccgcccatgtcgaacaggctgcggagagaggaaggcagggcaagtgggtactggggtgccaccgcccccttacccttaccgctccccacctgccctggactcgagggcagctggcccgggtcctggatgcaactccccctcacaatgagaccggtgtggggaactgccacctggtgtctcccacgggtgcgtgggcagcaaggaaacccgaagccatcctggaagacctgtgtcttccagggaaaaagggactcagggctcagcccaggcagggaaggctgaggggagtggggctgtcctatgcagatgacacccacccctgtggcctggcctccaagagctcagagccatggagaattgtttggagaactaaggagaggcagagatgccccaggaccccgcccgctgcctggcctccacccggcaccccaacaggctctcccaggtctccctgcacccagcacagagcacaggctgaggccgtgcttgtgggaagcagaggaggagggggctgggcagggaccccggatgggatgcacggcctagaactccgggcctgaatcacaccacctgcttcttccaggacccagagcatctgggcagacactcagtcggcggctagggcctctggctctgctgcagctctggggccccctagctggaggggtgtgcccgacactacccctctgcccatggggatgggacggacatattctgccagggcccaaggggagggcagggaggaagtgccagacagcctcatgtccagcaaggctttcccagggcctgctggccacatgtccccgaagccaggtgggccccctcaccctgtccacctgcaccctggcaccctccggtggcaggcagagaccagcaggacacaggcaggggcgtggagaatggggcagaggtgccagctgtccaggacgggaggggcctgggggccagcagagaggcaggatggcatgggacagatggcgtgggacagacagtgtgggacagatgacaggaggcctgctgaggcaggaggatggtggctggggctgccctctggatgccctgtaagagggacccttggcacagcagggcccggaaggagtagggcctgtccttgctgtgcaaaggacctcagggccctctctgggcaacggcagagaagcagcctcccgctcatcctgtggtgtggaagggacaggatacgggaagggctgctggatccaaacctggctctcaggactccccggaagcagcccaggtggacaaggctgggcctggctgagggggcggaggggcgcaggtggtgcccctttccatccatcccacctaggcacctcgggaggctgcaggcagcagacacagagcggaaccctcgggtccaccagccccttcacaggtcatggccaagtcacgacactgatggtgatgaccctggctggcggaggctggtctagccctaggaccagagcccaccacgtctgcagggtccagaaccagagccaggagggctgaggaagtgcagctgcccctctttggctccaccctgggcttcccatggggtccatctgtagctgggtgagtcctgacaagtctgaggccaggggcacagccgcggcttccgtcacgagggcctctcacccaaatcccagctctcacggtaaacacaaccactccacaaacattccagaagctgcctgtgcgcctgcctgtggggggtcctgtcccatgggagggagccagggggtggaggaccctggcctcatgtggagcaaggagcagggccacgtggctggacaggcagcgtcagccgccccatggaggcagatttctaaaggaaaaacttgaatgcacggccaggacgctttgctgaaatccaaagtccccagccgggcactttttaatctcctgtcttttctgattgcaaaacaccataagcagtgtcaacagggcagaaaggtccagataacacctcaggtgactctcaggctggggggaggagccccgcctgcatgacagggagctttggggtgggtcagagtcacaggatctctggatgcagtgggctgcttaggccaacaactgcctggaagtctactcctgcacagggcctaggcttccccacggctggccgggaaggcggggcacatggaagctctaaactgaagggaaactgaggctcagatcacgggtccaggaaagccctgagtcaggagggtaaacaactcgaagcccagcaatgggttcttaggtcctggcggcagtgctcaaccttcacggcctcagtttttccatctgtaaaatgggaccctcccactgctgtagctctggggagtggagccatatggaacacagcccagttttgcctggggacagctaagcattttcatttaggttccccagagtcaaccaagaaaaatggtttgtggtttgttggttttagaacatgcaagaatagcctgggcagagaggacagggccaggagtatgggggacacggattcctaggaggcgccaaatcagaaggtgacctgcaacagcagccggggcagaaagtcctaccggactgtgctgacacaaaagaaaaagcagaaactgaactatcgtttaaaaaacaacaacaacaacaacaaccaggaagcccacaagaataccccgaacaatgaaatcatctaggaatgtaaaaacaagactgttctccagtgcagaccagactcagatcccagttccccaaactcccgccagcaaagcagaaagaccatgggatggtgggtgcctggatatcatccgccagcctgactttatcttccagcttgtagaagactgtaactgcatttcttgtttgaaaatgatctgctttctggagggggaagtatacacccagccagccagctccatcctgcccagcgaggctcgggtatggagctgaagtctattttcgtgctcctctcagttccctatctttttctgccttaaaaaaatccccctagagtttctacacacataagttattcagatgcaagcttttctggaatccagggacgaaagccatggctttgataaatcatctccctcccgctcctctgcgtccacttcatccatcctctgaatgcaaaccgacaatggagaattcggtcatacgttggctcaatcgagaacaggcacgcaggatccctccttcctggctgtctggggaccctaccatctttggccgagtgagtcgatgataatacaagacatctgggagacaggatgcatctccaaacaacgtgctggcgtctcactccccacatgtgttctgagggctctgtttctggctccttctgggtagctttgggcctgggctacctgccaccactggcccacccagaccctccctgggccccatggcagggacccgccagcccagaggcagaaggcctccaagatgggtcggccagtgacggaaggcttgggaacagttttctgggggaaatgctgcaatgtttatatgagagccactttggacttggtttgcagtttcatttgaatctcctgagtagtggcacggctcttagctgttcaatccaacagtttacacgcgctcatattcggggctgcagaagcactgcagactccgatgtgcagctgccctggtcagtgtcccaggccaggctgggggattgctgagcagcaggaagcacttgcttctcctcagtgtgagaccgaaagggaggcgtatgggtcactcttcccttcatctgccccagtgggcggcccctgcagacacggtggcgagctgtggtctccagggtgcatgggccggctgcctgctcccagccaggccttccgtggagtgccaagctccaagcgtggccagcagggacaaaggccaccactcggagtccctgaggctccccgtgccatggcctaacccaccaaggggacctctctccagtgcgttcctgggcatctctgcccccttttcgtgtgacggccactcctccagggcctcggcagacaggaaagctgcccatgccgccagcccatgacagcagcagcttctggtccccagagccagcaatccctggtgcacgcggtgggtgacgggagcagctgcgtcctgtgggcctcctgggtgtctggagggaactggcattgccattttatgcatgacatggacagaggcacggcaccagtgaggggccccgggtcccagaagagcactgtggggtgcctcgtccagaggtgggtgagacacaaggacagctgccaggaaagcacagtggggtgaggcccgggcgtcagggcagtggccttggcaggcgggagggagagtcacacgcgcagcacatgctgtattttgctttttttggtgaccagtgtctcatgatgtctgggagcacccaggatgtctggacaagtgctgttcaaactgtgggtcatgacatcagctgaggagggtgcagccacgaagcacaaacaagagacaaaccgaaaacgcgtgggcaggtgtctgctcataaccaggcctgtccatgtgtatgaggacgggtgagaatggagagcacgctcctaactgggatgggatgggacggccatgcctgtgggtctggaccctcctgagggcgttctgtggccccaagagcatgtctttaagaccgcagagtgctcagggcagggctggctggtgacaacaagtctccctcggaggaaacagcaaggtggtgggggagagctgggctgggacaggcagcagagagcaggcctgggggcaacgctctaccctggagctcaccaaagcattgggccccaggtggagtggggcaagggggtccccaggagcttgtcacccatggggtccgcagcgcgatggtggcagacagactcaggctgagtagacagcaggagtaggctggccgcatcccaggctgcagggcccatgtgaggccaaggtggctgctgaggtcctgggtgagcgggcaccccatggcctgcagggtcgaggtctcgccattatctagccagggaaggaggggaagagggcactggtggctgctgagtgtgagggctgggacaggtctctcctcctagccaggctggccacccaccccccatgcccaggagcaacacaaaagaccaggcccagcaggggtgaggcctggcccatcgtcctgagacaacactgccctcttctggccagttctggaaggacaggcttgctgcccaccagctgcatcccgactgggacaaccaaggcctggggcatcctgggacacgtgctctagaaactctgcgaggggccacagtagattaaggcccccctccaacccccaccacctgatcgggaagtgagggaggcaggaggagtgtcccagctgctttcccaaccagagccctccacctctgccctgtggggtgagcctctccaggacctggggcggcctcaggcccggagtgctgcaagggatggtccctctctgggcgcactgcttcccagaatcgtggaccatgcgccccctgccctagctgcgaagcttgctggcctgcagtggctctggtgcccacagcccaggctgtttgtggaaggagggggcagcacatgggggctcagaagacgaccaggagaagcagggggatgagtcctggccacctctgtgctcacacaaacctgttcggggctggagtgagtggggaggggtcttctggggcctcccacttaggaatggcctccagtgatctcaggcacctcaatctgtgtgaacatgttgaaagtgttaattagcaagtgtgctgcgcttttgtaaccctgttcttgaaggtctgcctgaggggtttaaaaaggaaaacaaaaaaagcagcgaatggcccctctggtacagtgacttggagatggggttcatggcgaaccccaggatcacagcgggaaaagactctgagaacaacagcaaaacccccggaggcttgacggctacaggccccacatggggccgcttggctctgaaccaggctgagggtgtatgcagccaccacaaagtcccgtccctcacccctgcgtgcatgcgagtgggtgtggtggcatcacacccagagaagcgggaaggggcccgggggtggctggctgggggtgagggacggccctcaggaagtctgtctcagtccttggctgacaagcctgacctgaagcaggaaccagggtgtctggttcataggccctcttggaccatgactgtggccaacagtggactcagcctagctccagggaagctgctggaagggtaaggacggagcagtaggaggggggcctagccagccccaaaccccgcttgatgtacgcatcatggaggacacttttgggtcgaagacacggaacaggacaaccaggggacgggagctgtctgagaataaaccaggcctggcctgagctctgcctgtggctcccacctccagcctgtgctgcagaaccagctgctggaagtgggcatcagggcctggcctgcccagctcggtgaggacaccgggcctgctgctcttgcccgaagagggcccacgctgtgccaggtggccactgcgagagagggaggcaggggcttacactgtgatcattgcaacgcagcacagcctcggtcagttccctgtgtgtgtatccatgtgtgtgcgtgttgggggagtgctcatatctgggactgtggagagagggatggaaaaggctggcctcctcttagtaccccccacccttctgcagtacagctgtataatctggctgccctggaccagctctgattccccacaaaatcccattcctagaagctaaaatatctctggggtgtcttcccccagtcaaaggactaaaacccagagcaggccattgcagcaggcgcactgctctgggaggcgctcggcttcgggggaattctacgctgggctcatgctttagtttcataccttaggatgaagcatcgtggctttcatgttgggataacagactgatttattatttaccgaacgcagtaggcgctcggcagatcaatttcaatacaacaatggactataaatgccaccagcaatctggcagtagcagtaatcaacaaaacatgttgttctaaatgctgcataataaattgactacaataaactcataattactctactggctacatttcaaagttagcactagaaaaatcaaatcaccaatttggacttggcattaacatcctcggatcactcctgcctctacagctgcagctgggagatgcaggtgccatgtgctgtcccggagggccgaggccacagcatctgggattatgccaggaccctctccggggcagataaagagggtcataaaggagcagtcacttcttctggggtgtgctgagcccacagaggagaaaagctcatggccacgtggctctggcacagggctctccagccacccagaagtgccccctggactgtggggacccactgatgtggcctctgccgtgagactgggttcccatgtcctgtcctccaggcccagccagaatgcgctacagggttaaagagctttagaaaaggtttcagggctgggcaccgtggctcacatctgtaatcccagcacttttgggaggccgaggcaagaggatcacttaagtccaggaattccagaccagcctgggcaacatggtgagaccctgtctttttaatattaaaaataaaaaaattagctgggcatggtggcttgtacctgtagtctcagctactcgggaggctgaggtgggaggatctcttaagcctaggagtttgaggctgcagtgagctatgattgtgccactgcactctagcctgggagacagagcaagaccgtctcttaaaaagtttcaggacaccaggtggtgtctggagccactggtgggtccacggtgtgggggcagggctgccaccccctctcctgctctagtcccctgctgagccaagtctgagtttgccaattctttccccaagtgcctctggcctcacacctgggcctggtgccctccttgtgtctgagttccttggcccacacatggggtgaggtgcctacatcgcaggatcagggcgaggagtgggtgagaaaatccacagagacccagaagaagggcccagtcaccttgtggccccaggcatgtaggaggaaagctgagctccgctctgaccctcccagccccgagcacggtggctacgcaggggggactggggactcgcccaccatttgtggggctcactgtggtgccagagtgaaccaggatccgtggagccagtgctgtcgggtaggccagggagtccactaaggcccagcgcgcagtgggtggcggttccactggcctgcctccgcttgcaccctcaacctgccgtgttcctaacacagccctactgtggcggcatatgctggccccacccaaggtctgagctgagctcctgccagcatggcctgagctggaacagctcatcagctatggacctgggtgagcggggagcccgggcagtctcagtaggccatgtgcccaagggcagggaggaccccgagactgagtgtgttcctgcaaatactcggccctgacagctcaacgctcggcagctctctgggcagctggttgtctgtccataggtctgggcatgtgtgttcctgtccttcagtgggcatggctggggactctggggggtgggctcccacgactacctgctgtagggtgaggcggggtccaggccggtgagcagccatcatgggaactcccgctggaggagctggcacattggggtggctcctcgatgggaaggcggaggcagcccagctgggcgccacgcaggcctcagaggacatgccatgctgctggggggcagagggctctgcaggaggcttgttcgggtgcatctgccatagaagaaagggcaccaaagaactgggagggacaaggcacatcctctgctagtcagtgaccacagtgaaatgtctggaggccaagacagggcctgcgtggctgtggctgagccccagggctccagcactggggtagctctcaggagctctgcactgcctgggctggccctggctgacatctgacgtgcagggcacaggcaaagaacgcggagggactgagcagaggccaggctgcaagtactcacacacctcctccctgccccggggcagcggcccagctgctctgccctgcacaccgaggggctgtgggtaggactgcaagtcctccaatgagagaaaagactacccgaggggcggaggccgcagggcctgcccacatctccttgtcgtggcttctatgaagaactgtgagcacggcacatcgtgctcaggaaagccctgcacgcagccacgggtcagcactgctgacttgctgaacgcagggccgcagaggccacgggctcctgcagcaggaggatggcaggtttcagagcgtgggaggctccctgcggtcttcccagctccagaccaagaggcctgccctcctggcaccaagacagaaagatgcgagcgtggtgccccctgaacggagaggacagcctggacagaggctggggatggttcaggccccctcagagagcccacaatcccatggcccacaggaaaccatcgggggcccctctcctgcaccctctctctcagtgctccctggggggtgcaggcttttggccctggagaaggcaccacgcaggccgatagccttggcagagaagtctgggccaagaagcccagggacttgctgtggtcagccctctcaggacagggacccagaggcttctgggccatcttgaagttgagtccaaccttggcctggctgttcacacacagagccagggccgctggccctacttaccacatatccccattctggatcgttcggtcgttgggagctccggcgtgtccgtagtgtagcacggctgagttctcaccactgcaaagagccgggggagggtgatcaaagcccattcttctgcagcaggctctgaaggagggggtggatgctcgatcccctgcccatgagcagcactgtccccacctccagcacaggcccaggcgtggctggaccaggtccacagccagaggtaaggccgggggacatggtggccctgtcaccccgcagtcacatggctggcaaccagcctcagtctgcaggcagagcctcctggctgaaggcgtcgttaggcggctgccctctgggctgggatgtgggcatcatgtggaacacatgtaaaacttagcaatgggccgggtgtggtggctcacgcctgtcatgccagcactttgggaggccaagaaaggcagatcacttgagcccacaagttcgagaccagcctgggcaacatggcgaaaccctacctctacagaaaatgcaaaaaaaattagctgggttaggtggctcacagctgtaatcccagttactcaggaggctgagctaggaggatcacctgagcctgggaagtggagactgcaatgagctatgatcatgccaccgcactccagcctgggcaaaagagggagaccctgtctttaaattaaaaaaagagcaaaaaaggggaacagcagttcctgggcctggagaagggccctacggaacccctcctttcctggtggccaaaggggagagggcctctatggaaagggccccggctgtcctggagctgccctggcgtcctgaccaggctggagagagaggaaaccaagaggatcctcgctcctctgcctgagaaggcttccctaatgagcgatgcctttaagaaaaaaaggacttttaagtctgtccaaaggggggaaggaaacccccacctgggtgtaatatttatggccctgctcaggagtcttgggaatcataaaagtagaaataatggttttctctccatccaccagagaagaacatttccaaggactgagatttcacatgtattattcatgtgccggggacgtgcgcattggcagagctgcctggctccatcctggccgggcaggggccagacccgaggggcagagagcagggagactggctgggagagcgcaggagacgagggggccacgcccacagccaggacgcatgtgggggcagacacaccccaagggacacatgccgctgtgcatggcccacacagcatggcaatgatcccatatcactgtcatttctaccatgtgtgtgcctccaagcacacccagccaggtgttgatggcacacacccaagcgcacacacccacacagagccctgcccctcggcaccatgtgccacgagcaggcacaccaacagtgacatgcacacccacatacagcagcactggtccccacgcagccacacccacatagacacaccaccaccactttctgcactgacccttccacactccacccctgctgcacacagaagctgcccagcctgagctcacagcccggtccccacatgctgtgtgtgtgcccgtgtggaggagtggccttcctgtgcttagctgctgtgctgaccagctggggacaggagggaggggacgccaagcagcccctctgcagtgggcaggccatgctccctccttcacccagtgccaggtcctgcaggcagaggccacctcagctccgggagtcttgggagggaggagcgacttccaagcttgggccgggcgctggtgtgggcgtgtgagtgagcaagtgtggctgagctgggggatggtggagccccccactcactaactgccctacctcctcccactggtcacccccaggggagccagggtgccccgcttacctgccgcagatgcaggtgtaggagctgtggcgcatgccgccccgggagtagcagtagtgctcgaagaggctgcagggggagagacgcgtcagggttggggcactagagcaggcacaccccactccacgagccccatgaaccccaagggaaggccctcggcccatggtctcccctgccgtggccccacaatggtccaaactctcagtgtgagtctgtgaggcttacagcctgggggtcagtcataggctgcagaatctcagaggccagtgtggagtgacagagaagctgggggcccagcagggcgcagccacctgccagaggagctcgccagcctccactgactgccatggcgagtggcttcccaggcacatcaggacagatgggactcctggagcctgcgccctgtgggaagccgggctggggcagaggccacacatttctgcagagctggaggaagtgattccctgtgactccgtgcccagaggccaccacccaccctgccaggaggggctggatctacggcctgcgctcacccggggagagggcacaggagctatgggcagaaggggcaagggacaggcctcctgcaggtggggcagggcagggtggtctccagggatgtgggagaggcaaggcctggggcacacatcctgcttctccctccttggaacgagctgcctgctggctgggcccactctacaagctcccaccctgagcgggtagggccacagccaagtctggagagaaagacaagccctggccccaggctaagcccagaacctgcaccggggaggcctctaggatggcggatggtagcacagtcactgcatggatctttgagctccaagggactgagccattctgccttggtcttcctctactgaacccagctggtgaggggtgtggtcgtggggagctgccctcaccccctccctgaggcctcggcaacagctttcctgccggaccacagctggtccacctgccaccacgtgagacaggcccaggtggcccccacccgcccacccccgaccagggcagtcgttgcggccgcccaagggcacgccacatggcggtcctgccctgcacgttccaggcctgccttagagaacgtccatacgagggagtttcatcttctaggcactgtcaacacaaattatgtataattgtcatgattggatattaagcagttgttatgcaggaacggctgtggtagattcaatgggctttcagacttgccttccaaacctcacaggataattgggtatctgcgagtgaaatatttcctgaaaagaaaggatttcaggagctgccagggaagcaagaaagccacatgctcctctcctcagccgcccccgtattcgtggtgcaagcgctcaggaggccgcttccacctcgctcctgggagtctcagcgctgagtttcgccacagtccaggcacgttcctaccaaggcaggcaagggcagtgccccacatggcaagccctgtgcgccaggccagacaggcagcctcagaagccacttcacacctctgtggcgccctcccagaaagcccgagaagaggcctgacccacgccgtggaacaggggtgctcccttggctttgtgagatgtggtcctgcaccaacagaagcgaacctcagaggtcacatggtcattctcgacgtgatggcgacagcggacctctgtgggacaagtgacctgcagacaaccacgggctgcgctgggactggccggcttcagaaaagacaggcagagggacagagatgccatccgcatgtgcagaggaactcacatattctacaagaaaggagcggcaggccgggcgcagtggctcacacttgtcatcccagcactttgggaggccaaggttggaggactgcttgaggccgggagttcaagaccagcctgggcaacacagcaagaccccagctctcaaaaaatcaatcaatcaatcaatacaagaaaaaaacatcagaaaggggaggcagtgaggaaacttggctctctcgcctgcagcaagcttccccctgcataacccactcagtggagacaactgtctttgaatgcctttgctgctttttaagaaaaaaatagtgccttcaagaaggcacagctcacagaagcatcaaactaaagaaaggctgacccagttttcacctgcaaagtgcagcccgacactggtcacctttgccggccacgttgacaactccacacactgttccataggaaggagttgaaaagaggaggagcaccacgtgctggatattcacgcccgcctaaaaaaagctgaaatgcttcacagtggacttcagtcctgaattttgttttaaatgaccttttctgacgcaacttgaggacacactggtgctttggtggcaataacaggtgggcaaaacgagcccacgttttctgcagactttaggcttggggtgtggacgcacaagggcacccaagttctgggcagctgtggcggcacagggggcctgtggaagcgtgtgagcccggcgcggcacagttctgatcttcaagcggtgagcactgaggggtggacattccaaactggggcccatgcttgatgcggacgcaacgtgtgcccccgcacagctgggccagagcttggcgagtggtgctgggatgaccaggagcaagtgtgggctatgaggacaggctaacagcctgtcccgtggatgaccgacatgccatggcagtggcagcatcacaactcctccaagtgcgaggcaggaggggtccagccaagtcatccctggagcaggctagctactacccacccaaaataattaacacctggaacaggctctccagcagagggcagcagccagcaagacaggcaggagtgtcaccgccccactgcgaccatctccataggctccttccataaatttatgactcacatcgtgcagccccggaccagctgggtctaacagcccctgctccctcctgctcacctggaaggcggatggggtggtacacacaccccagccaggctcaagcccagcgcgcacctcctccccagcagcagggaggggcttcctgattggctgagaggaggccgtggtctgcctaagtcccagccaacgacatcccggctgctgtgtgggccccgttgtttttccttatgtggccattcctctaacaccctcacctataaatttctcccaggcaagactcgggtagaagaggcttgtatccaggcataagtgagagagcccttaagcaacctgggggaactgcatgagtggtgaataacgaggtggatggagttactgcagtgtcagtggggcaggcacatctgtcagtgccaggagatgacaaatggggcaggagcagcaagttcccagacccagatctgcaggaatggggtccccagagacggcgtcgctgggcctcccactgggacccacaaatccagcccgtggagcgctcccgggcacacggcccagctcctgccctcagaagtttatcacctaacatgaagacgagtcacagtcctataaaaatgctgcagctgcccagacagcggtagaagggctgcctggcagcaagtgtcggccaagctatgtgcctcgagcatgggtggggtagcgccgaagaggttagtgaggcagtgtaaggggtggccctggccacatcattccctttccccggctgggcctcaatggatctcaggtactcaagaggtggagaggggaggctgggccggaaacagaagcttgggagtgaaaatgcgcagagctggtggagccccctcagctgggcagagggcttaggaaagcaggtagttgggacatggggttacaaacctgaggtggggagggtgtgttccgcaccccggtccctgtgctgggctccctgctctgggccccacatacccagccttctgggactcaacaccaacctcaagggcaaatcttggctctgctgctggccagctgaatggcctctccgtgcctcagtttcctcatctgtaaaatggggatgatagcggtgcctccctcccagggctgctatgccagtcgaatgatttaacatacatggagtatacacaatggtgcctggtacccaaggagctctgtgtacagtgacctagccatcgtggtcactgttcagaggcctggagggaggctggagaatggggatccctcctcaggcagcaggagaggaggtcgtgggcatcctgtgccaggctttgagaaacagcctcttgactattcctttaaaaccaaacagaatctgcataggtccacggcccggacacccactcccgcaccctccaggcagccaagttctctacagaagtccttcctgggcccacacactcccagcatctccaggatgttcaccagcaaaaacgcggaggtgtgtcctctgcaccagctaccgggacacgtgcgcacagacaggcttctggctggacagagggggcctgtgcccaccatcccttcacagctgcccctcgccctcacggagctgacccagggtccccgccttcccggggtgcgcccaggactggggcacataagagggagagagccacagagagtgagaagtacctcatgatgtttggggccaagcagttgtgctgtgtatagtcgtctcagcactaagttgcttataattcacatttattttaagtaattgctgcgatattttctgggtacacatgaccataattgtgtcattaacgtgatacaccacttactaagggaaaatccttttcagagtaagggccatacagtcctgcaggggatgccctgagacacctcaggccgagcagagcgtgccttatggtccccaaagtgggagcagctactatggaggacttggagccaaaaccggatgtttctaccagtggagccctggcatagctccttttgcatggaaccagaagcacgtactacattcttcttgaattcccatggaaggaggggagctgctccacgcccttcttctggggtgaccagtgggtcatcagaaggcacaggcgaaggcgcccaagccctacccttggaatcgccgcctgggtggcaccagcgacctatccaggaccccaactcccaggcaggtcctggctcttttagcactgttccccgtaggtcttccaaagagcaggtactgggacttggcagtgaactgggggactgctgcgtgcctccccttccccaggccccagcatgacgacaaacacagacaaagctaggaatgagcaccctctgaggctccgagtgcctgaaatgagcaagaggcattcacgtgatgtgtcaccaagaagggactgacctgaagcctcggactaaagccagaaatgcatgattaataaaactggtgctagcggagagctggtcagcatcaccgtgtagccggcaccaacatggcagcgtcagacacaggccgtctgcagcagatgcggtgctcggcttcagcagcttgctctgctgcccggagctcctcactccctcttcctgccgctcctacaccagtcctggcccacagacagagactgtttgacctggggcaacaccttcccaccagggcttccagaaggccagccagcatggtcacagggtatatggggccaggcttcttgggcttgcatggaccatctccatgtgggcaagcagatgaagtcacactcctggagccccactgctgcccagatcactctccctgactactcagctcctgccagggagccccacaaggcactgcactgtggggatgggtgggcagactgattcaatccaggccctgctgcccactcagtctgaggcttgaggcaggttgtgtagctgctccagtaagaaaaactgaacagtcaactgcagcatttagcatgataacaaccctttgggggctgagggatcttcccactgcacagaggatgctgcagtcagaacaatgacgggctggggtcaggaaacccactgaatccgtgttcgggctcggagtccacgcagggtctccgactgcaaagcttatggttttgacccggatgcctctgaaacctcaggtctgtcagtaggtgggggctggaacagtgctgacctcggggcttgctgtgaaggctgaagaagatgcagggaaaagcttcaactccataaacactggcagtgggtgatgccatggctaacgccttccggagccctgaccttgcacccatgcacaaggccagaactgagcagaaaagggtctgcaaggacaactggcccaccaagtcctgggcgaaggagccccaggccagccggtggaaagcaggagctggggtctgagagaggcctgggatgctgaggccccgcccagaaggggggatccgccaatcacaggcaagggcagcggccaagacagcagcggtcacagcaggaggaagagacacaacagacaggagcagctcactctctctctgagagctgccttatcaaggcacaagataattagcattttaattggataattgggaattctaaattgcctatcttgtattaagcataactgaggacataacatgacattcaattaacaaatcttcccctttattttcaacgtgcttgattaggttgagtttcggagttcctcggatcagttacggataaaacattctatctccttctccgtccccaagcctggctcatcagactgtaatatacttatgttttatatgtacatggagaagtcttagaaattctctgcacaaagaaaaaaagtcactgatcgtgttaacacccagaggtcttctctatccaatattttgttgaacattcttccaggcattttttttaaaggtataaacacagattaatatttaataattattttaaaaataattagctgtggccgggcgtggtggctgacgcctgtaatcccaacactttgggaggccaaggtgcgtgaatcacctgaggtcaggagttcgagaccagcctggccaacatggtaaaacccgtctctactaaaaacacaaaaattagccaggcatggtggcaggtgcctgtaatcccagctacttgggaggctgagacaggagaattgcttgaacctgggaggcggaggttgtagtgagccgagatcgcaccagtgcactccagcctgggcgacaaagccagactctgtctcaaaataaataaataaataaataaataaaaatgattagctgtaattaaaaaaaaaactcacctttttacagaagtgggacatacatacagaaaagaactcaaatcctacagacacagcacaatggcccagcacaacttgggcacgcctgtgtgcctggcccccctcctggtcagtctctcttccccaggggcagcctgactcctatcaccatagattagtttgcctattttttaacttcatgtaaatggaatcaaacaatatggtctcttgcgttggctgcttccgctgccacaatgtttgtggacccgtctaggtgggcagcagtccctggttggttctcactgctggccggtgttctactgcgggggtgggcccccgtgtgtttctccattcttctgtgggtgagcgttcgggttgtttccagatcacagctattatgggtagtacagccatgagttcttgtacagtcttttggggcccatgcatgcatctctggttgagcaaacagccaggagtggaaatgctgtgtcacagggtttttggggggtcagctttagtagacaaagcccaacaggttttctgagtagtcacatctttgtggtcactgtcctgaaacttcctcctctccatacctgtgaatggggcccaaactgggctgaaacaagtctgcaaggacaaacagcctagcccggtccagcgcaggggctgggctgacccactgaaggttcttgttaaagcaaagaacattttccttatcaacagatacatgtatgtactttttatttttgtttttcatttttatttttagagaaagggtttcactctgttgctcaggctggagtgaagtggtgcaatcacagctcactgcaggctcaaagtcctgggctcaagtgattctcccccttcagtttcctgagtagctgggactacagacatgcaccaccatgcccagctaattttttttatatgttttgtggagatgggagtctcgctacgttgcccaggctggtttggaactcctgggctcaagcgatcctcccacctcggcctcccaaaggtccggtattacaggtgtgagccactgtgcctggcctatttttatatttaatgctgtcactatgtccagaatctgaccacttctccgcaccaccacaactccctccctggtgcaggccaaggttctctctcccctgggagatggcgatggtggctggggatggtgaatggtgatggtggtctggctggcccccctgcttcagcccttgtcccctacagagtgtgctccacaaacggatccttccacaacttaagtagaatcacaggactcctctgctcacaccaaccccggcttcccatcggcagcccacctcccccttactcccctgtcttgtcttgtcttcttagtcgaactccgcgctgctcctggaactgccaggcaagttcccaccaggccactggaacagctttttctctctgcctggaatgtccaccccagaaagccacagcatgctctctctcccccttcaggtctctcctccccttcacagggaggcatcctgagtccctggataaaggtagctccctcccctgtaaccctcaccaccatctgacatgtttatctagctatcccatcaatcaatcaatcaatcatctgcctatatctacctacttatcatccatctacccatccatccatctatccatcactctagatctacctacctatcatctacctacctataatctatctacccatccatctatcactctatcatctacctatcatccatctacccatccacctatccatctatcatctatttacttacctatcatccatctacccatccatccatccatcactctatatctacctatctacctaagtgcaatccaactacccatccatccatccatccctctatcatctatctacctacctcctacgtacctatcatccatctacccatccatccacccatccatccattccatctaccatccatctacccatctatccatccatccctctatcaatcatctatttctgtcaacctacctacttatcattgatccatccctccctccctctatctatccatccatccatccttctatatctatctatctatctatccatctatccatccatccatctctctatatctatccacccatccatctattcctctatcaatcatctatttctgtatctacctacgtatcatctatccatttatcactctatctactcatccaatactctgtcaattatctgtttctatgtctacctacctacctatcgtctatccatccagccatcatcctatctatccatccatcatctatcaaggtgatgatcatctatatcagcctacatacttacctacttatcatccatccatccatccatccatccatccatctatccaaccatctctagcctcccattaggcttgagctttatctttttgttcactgtagtatccctcaagagaccagaacagtgcttggcacatcagaagtctttggtatacctctgttgagtgactgaataagtgaatggctgtatgagcagcaccacagcctctaatttacttaaccaacttcctgctgttagagatggaggcttcttctgcctctctgtatgatggccacgcatggccttgtgcctcttcactgtcctcgggctaaattcctagaagggagattattgaccaaatgcacatttccaattctcagggcatgttctgcaaaaaggacccctgaacactcataaggattttggggtcctgagcagcacactgcaaggctcgtctgcccacaggaatgggaacctggtgggtaaaacacaaaagtatttcactgtttcactgatgaactgacaaattttaatatgcttatatgtctacttcctcacatttcttcctttctgaatggcttgttccttttttaaaaactgcgaatgttcatcattttcttattgatccttaagggatttatacaggaagaacacaggcagtggatctgactatcatttatgtaacaagtttcccctttgctccttaattttctttatggcatttctggacagataatttacatttttattggctagatctgttacatttttttctttatggcttcttcctttaagaagtcgttccctacccctatgattatataaactctatcatcttttgtgggcttcctgtttgcacatttacttaatcaatgaacctagaatttattgtgatgtaggtcatgaggcagaatgccatttgattattttctttgctttcactaactgccccttgtgcgctggcttggagcaccatcttgttgaaagataaatcctttacataataagggtggttgggggctgcgcctgtcacctgctcctgtgctgggacttcccactgccctcactggggctttcagggcaagtccaccccctccccaagcagctggccctgtagtgaccccctccagtaagtaccttctctactgattcccaggaagaaggacaggacaccagaggcagaacttgactggtgcctgggaggctgacaacacagaaccgaaagaaattcaaagctcgcagtacccgccttgagggaaattcgcaatctgtgactctagacctgtgtttggcaccttgagccagcgagggagctccggctttggaaggcctgggaagagctgtgtaaacacaagcaccattggccaactgttctctgacttattctgggatccacacctgttcgcgtctgacccaatctcactaatccatgctgactgtagagatgacacctttcttggccctagaacaaaaactcccccttttaaaaaggaccagaaggccagtgtggtggtgcatgtgtgatggtgtactcaggaggatgaggcgggaggatcgctggagtccaggagtttaagcccagcctggacaatctagtgagacccggtattcgtccattttcaagctgctgatgaagacatacccgagactgagtaattataaaggaaaagaggtttaatggactcacagttccatgtggcttgggaggcctcacaatcatggtggaagacaagaaggagcaagtcacatcttacatggtggcagggaagagagaaaatgcgaaccagtggaaggggtttccccttataaaaccatcagatctcataagacttatttactaccatgagaacagtatgggggaaagcacccccatgattcaatatccacacagccaaaccatatcagaccccagctctttaaaaaaacaaaaaaacaaacaacaacaacaataaaaaccaggttaccctcagatacatccagagaggctcaaaccacatgaccaggaaacaaaaagaattgccagaggccaggtgcagtggctcacacctgtaatcccagcactttgggaggccgaggcgggtggatcacttgaggtcaggagttcaaggccagcatgaccaacatagtgaaaccctgtctctactcaaaatataaaaattagccagtcgtggtggcacacatctgtaatgcgccactgcactccagcctgggcgacagagtgagattcagtctcaaaacaaacaaacaaacaaacaaacaaaaaggcttgccagagtggcagatgatcctagttcaacacaacccagaggccacattgtccctctaaggaacgctggcaccctgtctccatcctccccaggaaggtgtgggggaagcaagccaggtatgcagggagctttctggaggggcgagcaggggcaaggggagggaaggggctgcttttaagttcacatttcccaaagcacaatacgagtccacgggatgacattatgtagtaccccactagcatatttccttcatgcactaggtatttatcttgaagcgctaatgtctgttaatggcaaattagattgggtttcattcatgacgaggataaaaagcatcttaaaacatatatttaaaggaaaaaaaatgagtcaattgaaagaaaacgattaagcagataatagtagaggtgagacaagaacttgaccaaaactgccagggtgtctcatggaatgactaactctgggagatcccgccttaaggcttctttgaggaaaagcctggtttttcgttcttgggcaaggcctttggttcagaagctccccaagtccccagatggcagcctcaaactcctgggctcaagcaatcctcctgcctcagcctcctgagtagctaggactactggtgtgcacaaccacacctggctaatttattttattttattttatatttgtagagacagcatcttgctatgttgcccaggctgctctcgaactcctggcctcaagtgatcctcccacctcggcctcccaaaatgctgggattacaggtgtgagccactgtgccaggcccaggttcaatatttagggaacacatgtttggcagaggatctcaggtctcatgtcactgcactccagcctgggcaacagtgggagtcacccagatcccaccttgtagagtgaggacagaatccccaagtcaccccttctagaaaaagcaagtgctttgctttggattccctctagggcatttttctgttttgtcttgaaagagtccagcactactttatttctaaacatcaaattgctttttcagccttacaatctgaaaatacttcacaaatgtgtcgtttcagatctaactttctctggaaagtgctgtttcctatcaatgtctttctaaagcactgtcgcacctgggcccagctctgggcagcccctgcaactcactcagttcatcctgagggtctagtacccagttccctccctatcgtcctctgctgagggctctggagaagagaggagaagcagtctgtccacatggactcacagccactctcggtactgtgagcacaggacactggatacagggacctggtcacccgggaggcagcgccaagccagtggtcactgcgcagcaggtggccttggctaccccattaggctggagggaaccaggaggagctgggtcactgaggaaacaggaggagctgggtcactgcagccccagatccccagcacctgcaggaagcgaggaccacagatgcctgtgaaagacgtctcctctctgagaaggttcttccaagcatccaggaaccacaaggcccaggacgcagcgaaatgtgccatggagggaggcccagacaccatctgtcagggccagcctggacaggccctaggtgggcagggcccctccaccgcgtgcggctgtgttttatggcagcgaaccggctgttaggcgtgaactgccgacaacccctcttctaatgagcctttccatcctcactcacgactccaaacgttattttagtcacacttggctgaaggaacaacaggaacgctatttatcactttgaaagtctttatctacttaagatgatgaatgggggtggcagtcacgccgcccctacagagagcagccttgagaagaggagtgccttggccagggatgcactccaagcatggagctggggaggcggaggctgtcgtggctcatggcatctctagcatgttctgcacctgtgccccatcggggacctctcagtgcggatgccaccatccaggtcctcagcaccctctcgtgccacagagcacagaggtaggagatgggggaagtgggacagccccaggagccccccatcggtccccacctgcagcaggatgtccactttggctccacagaggatgggaggggcgatttaagaaccaactcacatgtcctaaacctttgctgctgacatcccagagacacagggcaagttccaaaaaatcctccaatcggaggatgccaggaataactcttgcaaattcaactttggggtagcttaaacctatttatcaatagctaattaataaagtctaagtctttggatgacaggatgattaaactggtttttaaataatccatttttaattaaaatgctaccctcttttggcttctggatatattcaaaaggaagccttaacagatcttgtttttaaatatacattatacgaagccaataattagaagaatttgtgcttttaattatatcttaattattctttgcctatcgatgcaaagttaaatatcctttctttatgacaccaacactactccccaaagccagtagattgctagcaggaattgtgtgtgtgaagcctgctcccggagatccgtgcagcagtgacggtgcctgtaggcaacccatacccccgtcctggcaggcggcaatctgatcatggcaaagcactggctctgggcagcactctcctggcccccaccttgtaagagacacgcttgaagacagaagtggtcgttatgtgatgagggtctgggcccccctcctgcatagccaggagccaggaagttccttgactttactcgccagcctgcacacactctgaagcatctcgccagcgccacccactgaaatttagaaaattcgcacagtgccaaggagggcttggaggatgcagaagagggagtcacgcccgtggatgccgggtttcctgatgtgctttgctgggtccccgcagggagcccaggcatcacacacctgtccagcataccccgagctccctcttccaggacccacagcaacacctatcccaagcccacccacttctagcaccttctatcggacaccttccacactgaccctcaaccacctgccagtctttaacaggtcccctcctggcccaccttcccaccaggaggtcatggctagaggggtctcagtggactcctggcagctgctgcccttcaggagctgggaggatgtccacgctccacctcctgctcaccgccagttaccatccaaaaccaccgtgggccaggctgacgcccctctccagaaatctccctgggttccccaaggggcttctcccacctctcaccaccaaaagccctctgtaggcaagtccctccccacacttctacactgcagaactttcagcctggcaccctcccgttccctcccagtcttgaagggcactcctagaggcaggcccatgtcacccatacccaaggctggccacagtgatgagcacacagtaggtcctcagtaaacatgtgaagaaagggtaacggatggcaggaacagcaggcctgaacatgcccaacaatccaaagaacattcacacatacatgcacatatgcatatacgcacacatccacaggcagccgaaaccctgtctgcccaggcagccccgagtggagatctagccctgtgttcactctgcttcctctttctgggcacatatcttagcctccctgcagctaggctgggaccataggactgactctcatcccaagaggaatatgaaatgacatgtgctgcttccaggccatggcttttaagagtgggtgtgaattcttcatgttctctctcttccttctcagagggggcagagttgggcagtggaagcagccctgcatccctgctggaggagagccactgggccagccacagatggcagcatgagcaagaaatgagcctttaccgtgctaagccaccgagatctgggtttctgttgttaccaccccaaaggctaccctatactgactaatacacctgggaatttagaatacagcaaaaatggaattttacaatggggggcaaagacattactccaaagacaacaggtcacttagtaattacgcgggggcagaaaagccagaatccttgtttatatattattcttaaatgcagtttagctcaattaacgtattaaatataaaagacgaaaccatgtggatacacagatatctattaaactatacacagcagtgtttgaaatatttcataattatgcaaaaactgttatttaaaagaaagtcatcagactataaagatagaaaaaacatgctgataactggattatattgaggtagtagaaaaagcaatttcgcaaaggcataaactatacaggaaaggaccaacatgacaactgatatttacaatttctgtacatcaaattgggaaaaatatttccaacacacagaacaatagtacaaagagcccaattacagagcaataagtcacccacaaatgtcccgattgcaaatgggcaaaggactgaaaacccacaaagataaatgcccaagaaatacttacaagagaagtttaagctcgtcagtaatcaaatcagcaaaaataaagacggggtattacttttccctaatcagaatgataaaggtgaataatggaaataacacaattaatcttgaggcctgggtgggcacaccggcactcatggtttgggaggaggggtgtcctgcacgctggctgagaacatggcttctggagagaggccacctggctcctctaagacccatctgtctactgtggggtctctataatgcagagaggatgccacactcctctccgctccccctcacgggattaaatgagaacatccccgggaaggacatggtatctgctcaccagacactaacccagccccagccgtgaagggagaacaacttttctagatggcactgggctttgggcatcaacatttttccagcaattccatttgcaggagtttaccccaaggacacggtcagtttgacacccgagagacggcgaggtagggttgacggtcgaagtgtcgttcacactgggaaccacctggcttccgggggcagtctgggtaagtggattatgatgcagccccagtgtgccccagttcactgccaggaagagacttctgctgcaaaaactctgcccagtgtgagcccagcagatcaaagcccgtctgtctgtgccccagagagaccggaagcctgtttgctacagcaataaggttttgtgtgcctctgcatcaaagggtttttttcctatcttgtttataatgttctgtactgactggatttcctactggcatatgtatctttttatcagagtaaagctattttcattttgaaaacacttttgggaagaaataaaagctacctgtcaaagacctgctcccctcgccccagcctcgccccactggccccagggggcttcttgtcctgatgtgttctgcccagtggacacagcgcacactccccaagcacagctgccaccgaggacgacactgggaagctgccaccagaggtcgcaagtgcacgccgtctgccacgcacacagagctccttgaaaaaccttcagcctggctgaaggaaccacagtgtatctctgttttgataccattgttgtggacaaagtaaaaaataagcaatccagccaggtgctgtggctcagcactttgggaggctgaggcaggaggactgcttgagcccaggaggtcgaggcagtgagctatgatcgcaccactgcaccccagcctgggcaacagagcaagatcctatgaaggaagggaggaagggagagaggaacagagaaagggagagaggaaggaaggaaagaaggaaggaaggaaggaagggagggagggagggagggagagagggagggagggaaggagggcaattcaagcccaattccttcccgaaggaaggaagagagggacgaaaagaaagaaaagcaattcaagcccaattcctccctgactctatcaggaaactctaccatgggttgaaatcacccaaaatctgaatgtccaggtccccgccggaggccagggctgggggcccatcttcatcatcccaaaactcatgtgggaaatttccccaagaggagacagaaaacaaagcaaagatttcctctcttcattccgcccaagacaaagcatctgaaattccactctcgatgtttccttcattatctcccactttctacctctcctttttgccacagggggaaaaattcttcctgggaaggacatcctcggagacactcccctcccaattaacacccatctggcagcacctctgcctgaagatgggtagcaaatgctagtggagggaccactctttcctgcttcctggcctcatgatcaaaatgggaagattaggcaggtcgtggtggctcaagcctgtaatcccagcactttaggaggctgaggcaggtggatcacctgaggtcaggagttcaagaccagcctggccagtatggcaaaaccctgtctctactaaaaatacaaaaattaggcaggtgtggtggcaaatgcctgtaattccagcttctcgggaggctgaggcaggagaatcgcttgaacctgggaggcggaggctgcagtgagctgagatggcgacactgcactccagcctgggtaacagagcaagacaccacctcaaaaaaaaaaaaaaaaaagggaagattaaacccagagtgaccattacgagtctaagagtcataggctgaagctaagaagtcttcccaggtaagggccactctgggaagaaagtgcagccctatcccttcctccacccagagctcctgagctgctccactgcaccggcaggtttggaagcaagctctgtcggcaaggctctctggtatgcagcctggagaatccaagcccctagaaggcctgccaagtcctgcttcaggagcccacttagccttcttctctggaatcagattctttggcaaaacctctgtctgcacacggaggtatcccttttgcacagggagctagagaagtcagagactggttggaaaacagccttgcttgtctcctctggctaaacactccccacacggggcaccccaccctggggaccacccacccaagcaaaaggagcccaccccaccccaggggaacaccgacagctcaggtttccactgcagacaggatggggcagaacccgcagctctgaagagccgattgaaaaagcaaatttccctctggtgctctcactggaaaaaaacatgatagctctctcccctgggagcaggaggaagcctctttgtccaggaggactgtgctgttccttggaaacgagcctgctgccatgaacagatccagcaggtatgggcaaatcacctagaatgcataaaacattacgttcgccaaatccccctggacagaaatctcggattcagcaaacagctcagatctgaatggatttccactcacagctttgaaatcccccaattaaaggcacaagcgcatggcaaagttggaagctttggcgcttccgggctcccagtacccacagcctggatggagatggtggcagtgacatggcctgggtcacatgcacacgccttccagaggcacctcggcctcctcggctatagcagctagcgggtgtggctggcctggagcgacaggctccctcactgccatgctgcctgcagctgggttcccttgagtgaaaacactttaagggaattgtttctatccctccattcctgaacaagccagtggtccccagggccccaggagctacacacccatttgcatgttgtccctaatcaactgcaatccatgtcaatcagggccttactggtctcgggcacagaacatgctgggtgatgcctcaaagtgccagcctccccagcaacttcactaaggaagaggtttctttataaaatgtctgcagtctgatggctggctctcctctctttcagtgtgagctgctgttttctccttaaactgcagagccagagctctcttctccctgccaagggggcacgcccactccacaaacacacaaggtacaccaaagcccttgagacactcttggaataatgatgcccactctgtacctccaggggacttaactaatttataaggcaattttaataataaccatatattaattttacatccccttttttacctatttcagtggctatgaactgttaggaattaggtaatatattacaatgggctcctggggtctttttattaactaatgccccatatttaaaaaccttcttgtcaaatgagaaacattaagaagcgctgtcccttttataattgcttctaatagactcgatattcaggtcctggcctgaacagagagcccaggcgatacttccttaaattgcatttaacttttcattttctttctgtcatcggccaaccgaataattctgcaagtgcacaaatggtcattttaccgtgtcggtctgtagctctggagatgtctgtaaatctgcaagttaggaggaccactcaggtcaagagatgcacagcgtttctgcccggagtctggccgcaggagcaatgcttggccattttggtgtgtgtgtgcaagcctatttatcaaaatatatgccagtaaaccacacccatcttaaatacccagattgatgacatctcacaaacgtgccccgtgggtgaagaccccaggacatttcttgtctcctagagggttcgctcaccaccccttctcttcccctctcctcctctgtcaccagttttgcttgctgggaactttatgtcagtgggatggtacgtgcctttctgagcctggcttcttttgctagacatcactttcagcgctgttcgtgtccctgactgtggcaacaatctgctcgttttcactgcccgacagttctccctgtatggacacccacagtttacccacccgccatacacaggcttggcatctccccagctctagactcctcccccacctcatgtgtctccggtgcacatggggcaggcaaagggggagtgtggggcgccaggcatggaatgcttggttttgtgtggacgctgccagctgtgtaacggcgatggttctagcatctctgttttctgcttttttatcccccctggcagagaagaaactttgaagctcatcactttgtgggcctaggctggaggcatcggggcacctcagtaggcccaggggctactgggcattcctccactgcaccatccctggcagggcaggcgggaatggggttctcctaatgtcaggattccccgcaggacgagggcgcatctggcctcccttggtctcgggggtgaacttcacagaaatggaaagtttatcgtgaatgaggaaagggcagtaaaacccaaccccatttactgggtggggagaaagctgccacccagggtgtccaaatcagctgggaaaggtcacgccctttgggtggtcactgggccttgggaacggggccagaacccagccaggtggagcagcagaagcctggcacatcacacatacggtccagccctcctcggtccctgaccctccctgttctgggagtgaaggactgagacagggcactcaggtgttaaggttggggggtggtggggtggagggggcaggtacaaacccctgaggacggcctggagggaaggcagctgggtagacagcagcctccatgcccagggactcgggaaagatcaaagtgtgagccggaatgcgatgccagaggaagacgagggatggaagaggcagagaaccttgggcgctggggaggccaaatgaggtggctgagacggtagctccctcatccatccggcatctccaggcagaggagagcaaaggcctggccacccgcggctgcccgaaagccaccaggatgggatcctttgttttcatttccaaacccaaaggcccctcggctgggccggcgtctgatcccgactcaaagccacagggagcctcagctgggacgcaacctgagggcttggaaaatggaggacccagagccagttttagcagttgatgaataataaatgtaattaacatgatggaaaacagaagctggaggcccggctgaggccccagagagtgactcatcagctgcctccctgtcacttccggctgcccgggcccctcggcagggacaggtgccaggaggtgaggggcgccgagcccagacgaaggacaactggggcaggtctggctggggacaacagcccctccagaaccaacccccctcgttcggtcccagcagggcctgccctggtgctggggtccctgggccctgcagcacgcctctctggcctcaggtgctgcgcttgtaaagtgggagtgacagccacgctttggctgttgtcctctgggcactgtgtgagaatctgctgatgctcgtatggccgttagttctcaatcacgacaggactgggtgtcagaacctcccagggccatgggcagaggccgtgcagcccaacccacgctcccatggcgtccctggattggtcactgggatgctcaggtgagtctgaggccagggggtgccctccaggctctcagcaggtcctcggccttcccagggctgtaaacactggtggaaggtgggggcatgggagaggcatactggcctccaagaagcggtgagcagggaagggtgtgggcagctgctggaggagaatatgggtctgaggttagcgcagcccagggctccctctgacatctctgcccccatcttggtttcagggcactgcttttggcctagaagagcagaggagaaagaagcagaggagtgggaggaggagagcggggagaaaagaagggagaagggaggagaaggaagatggaggaagaggaaggagagggagaaagaggaggaagaggagaaggaagaggaaagagaagagggagagggagagggagaggagggagagaaggagaggcgagcaggaagaagaggaggagtgagaagagaaagaagcatgggaggaagagaaggaatgagggtactcaccaggcagccttcccagcaggccccatgccctgcctaagaggcaggcgggagccgtcctcagcatctcccaatggccgagtacaggggtgcttctgcctcatcatgatgggcctggtctgagggctccagtcctgcctgggctgcaaggctgcatggctgcatgggctatgagccaagttcctgcctggcaggccgcactcgagagacccaccccactcccctgcaggggcagaggggctgggagaagaagatgtttaggtcctgccaggaaggtcctctcaccacaaattccacctttatgggaaaatcaatgttattacctcctccatcttcccacacttgctgctggtctaaagcaatcacctcatgggcactgagccagaactgagccagcgctctggggtcactggcctgcccacccctgccttccgggagggccaggaagggaattggttggagagagtcagcatgcctagctctctgggtgcgaagagaggcccctggggccggttcattgggtccgagcaccagccatgtgatgcctcgctcacagcactagcaaggcaggcccctagtccacagggaggagggagatcttgcttaactacaagagcgttaaagtccgatgaggcagaagccacagggtttgatggaagacttcctggaggaggaggaaagaaaaagtgggaaatccagagaagctggcacggaagaggagcagcaaccaggcagagcagccagtgctccaggggccacgggagaagcaaaacaagtgggggtctctgagaacacggcccaggagcctaaagaagagacacaccacccccaaccaccgggctccggccctcggaaaagctgtgttgcctggctctgcacactactctgaatgttagtgtctcaaaacagtcaactttttcctttcaagagtcttctaaacgatagtttaactacctccatcaattggctggcaattccacgaacaaatggttctctgcttgtctcgaagttcaactacttttatttgtccccaagtatttggcaggaaccagttgcatcaataaagaaatgccaattttcaacagccacacgagatgcaggggttcagatggattttgtgtcggcagacagggcgcctggaggagctgttattaacagccagaggagacacgggggcaggcctgggagacagcactccagaatcagactagattaagaagatactgtaggcaccaagcctctaagcatcataaataatgctaaaattttagactgtggttgaactctctgctgtcacaatcgtttagatcatgatgcgtttgatgttttatagcaagatgacaaatatctttctcaactgctaagtgcagagagcccgttggaataaatccaaccaaactgcccaccacaggtaagtaggtggtgtcattaggaggagacttgggggggcggtggtgtcagaaatgcctcaggcagtgatttccaaaggcacgccccgaccgtgcagttcaggccatttttctcaaccctcgccagtttctggcacataatctcattgttggaagaggcagggtccaaactctgaataacacatggagtctgacaccctggctctcccctcagcaacaatgaagtcacagcagagccagagaaagggacagaaaaaacaatgcaggaaggacaatgtggtgaaatgtctaaccgtgaaacaggagccggtgcatgagagccacgggcaattctcctgggctcctggaagtagccctccaatcacaccagctggctccctgcccagacacaggctgcagggatgtccaggaacccagctgggatctcagagggcagacccagggtgctgggtttctagcatggaccctcagctgggcacagagagaagagagccacctgcttgctgggcccagaacgactccccacagttctcccagggtacaggctgtgcccactctgcagggaaaacaatgcccatcttacaatcctgccctgcagggggccccagaccaacacagctggctatctcttctctgagccagaccagggtgactcttgtggttgccagaaaatgccaactgcgggacatcaagagaagaggcaggtccaagggtctctctcccctgccctttgccttatgaggtctgatgccaagacctacgtcagggcactctatgcccccagtcttgccaacggtgagtgtttccactacccaggactggagtggccctgaggtgatggggggcgggcagggttctgctggaagccgacagcccaaccctggcaggggcagctgtccaggaggaaaatattctccccaagctttctcctcctcggagctgaactgtgacacctcagtaccaaccaatggcaaccctgggacaaaggagtgcttcctgcccttttgagacggagtctcattctgtcgcccaggctggagtgcagtggcacgatctcagctcactgcaacctctgcctcccgggttcattcaagagattctcctgcctcagcctcctgagtagctgggattacaggcacgcaccaccatgcccagttaatttttgtatttttagtagagatggggttttgccatgttggccaggttggtctcgaactcctaagctcaagtgatccacctgccttggcctcccaaagtgctgggacataagagacaggtggcgtgccttctagtcaaacaggggcctatgctcaaggccaggccagtggcacagttctcctccctggcagtgcagaagtggctgcccaaggacaggacatggagtcgaggttggaggggctgcttgagacgtcatggactgtttaccccacgtgcttcccctgaggagggaaaagtgcgacgtggacagggctcccataacctgggcacatctcacatgcatcacagccctgagggtgccccactagcaccttagtcctgtgcctcctggccttcctgccccctgcctccctctgggctgggcacctgagccgaggggtcctggctgttggtggccctgacttctggcaggaccctgaggagcagcaccagagcctgcagatcctgtcccagaggggccagacctcaggcataggcgggtccgagtaaagactcctcccctttgtgcacatgggcctgggagtgcgtgggcctaggccagggcgggctggcctctggtgtgggctggctgtgaggttcattgagcctccccagctgctctcactagcagggctgcccggcaatgcctctggggcccaggtcatttgctttagctccttgggagctctcagcaaaggagacaccccaggtgggaaggatccggctgagggatgcccaccacaggggtttcctctagtgtctgtgggtcacacagcccagcaccgtcctgaagaggctgtccccagctcgtgtggggtggctggcacccccgactgtcagcctgtcctgtgattaaatgagatcacaacctacagggtgctgccacccttaaggctgataaatgccatttataaactccctggagcaaatgccaaactttccaaggtggggttccaagaaaggttcttgtttttgtagagatggggtcttcctgtgttgcccaggctgggctcgaacccccggcctcaagtgatctccctgccgtggactaccaaagtactgggattacaggtgtgagccaagtgtctgccagagaggttcttaaatgatttgacactggcttttcctcaagcgtttctaaaccttctaaatgacaaccactgggacctgcgcaagacgagtgatcctggctggaaatgaacctctgaacctctccccagatgctcttctgttcatccctctgctgcctcaacttccccaggcacaaggggtctggactcttctccctgtcttccccacctcactcaatagcagctccatccttctggctgctcaaattcagacccctggagtcatcctggactcttcccacaacacccagccctgatgggctgctgagtcctgctggctctgccttcacaacctacccagggcctgcctgctccttccccatccactccaaccccagggctacaggagcctcctcctgggctcgctgctcctgacctggcccctccatctctgctttggacagtagccaaacagctggaccgtggccctcctctgctcggcccctcacctctctggccccacctcccaccttcagtcctctcctctgcccgagtctcctggctgtttctgttccctgacaccccagagctcagtccctcgcccactttgggtctcacttgactgtccgctctgtgcaaggctttcaacatcatcctactcaacactgtcaatcactcccaggactccctctactgccgtccccgcttttatttttccacagtcctggtcactattgaatgcactatgtattttacttctttatttgactgatttcccctctagagcttcacagatgggattccttctgttgtgtctccccagctcctagaagagtgcctggcacctgttgttactcagcacgtgtgtaatccggtgaggggcactggcaggctggaaatgacgaacactcaccagccaggtgacagggcaggtccatgggcagcctgacttcccaggatgggtggtgcatgatgggcacccatcagcctgcttggccgggagcagggagaggatcgggagacccaagctgtactccaggcaaaccctctgaatggtcaaattggagttgtctgaaatggacaaccctacaggtaatgtttagatggttctggccccacctatggcatctggaaacgatgtctgatcctgaagggatgatgagcctggttctactatctccaccaagcccagggagctcagccctggctctccaaggcctcctgagatggcaccttcagaaacacgccctggcatttaacatctttcgggtgaggctggcctttggccctgggaccacctgggaacggttgccacatgcacctcattacaacaccaacacgtgccccttatcagccagcccagtagtgcagacctgattcctcgataaccactgggctatcaggctcactggggttggtgaccacatccccaggaaatacggccgcctgcaagagtgcacagtcccggggaggccgccaccttgctcagacctgcacgtctttgcgcccagccaggctgaatccctggagggctgagtgaggagcccacccagtcctccttccccaccaccagggtaggaggcagccctgttccttcccttcactcaggagcatttatgagcgcctgctgtatgcctgactctgccacagagaaaacagtgttggggctgcagcaatggcccctggcttcctggctgaggccgaccttgacccagaggtggctgggggatctgagccccttcccaggcagtctctttccacttcatcaggcagaaacttcttcctcactagagctggcctgactctggtaacatgtcatttgtcatcataattcataatgcaataggtatttgtcctttttatgggtattttaaaactagaacttctctgcaagacaactgtgcctttccagtgccctgcactgagacagtaactaccgggttggaagaagcaggtctccttctgtggggcagagatcaccatggaaaagtggagcacaggccctggggccaaagatcagggttcaaagttggcctcccccactagcttgtggtgtgatcttggacaggttactgagcctctttgttcctcacctgtaaaaggggcttaataatagtccctgggcctggcacagtggctcatgcctgtaatcccagcactttaggaggccgaggtgggtggattacctgaggtcaggagttcgagaccagcctgaccaacatggtgaaaccccatctctactaaaaatatgaaaaattagccgggcatggtggagggtggggggcacctgtaatcccagctacttgggaggctgaggcagaagaattgcttgaacccgggaggcggaggttgcagtgagctgagattgctccattgcacttcaggctgggtgacagagtgagactctgtctcaaaaaaaaaaaagcctgggcgcggtggctcacgcctataatctcagcactttgggaggctgaggcgggtagatcatgaggtcaggagatcaagaccatcctggctaacacagtgaaaacccatctctactaaaaataaaataaaaaaaaaaaattagccgggcgtggtggcacacacctgtagtcccagctactcgggaggctgaggcaggagaatagcttgaacctgggatgcagaggttgcagtgagccgagattgtgccactgcactccagcctgggcaacagagcgagactccatctcaataaataaataaattaattaaataaataaaaatttaaaaataaataaataaaataatggtccccttactcagagggttgctctgagaattaaaccgatcttacctgtcacttaattatagacacgtgcagggcccacaccagaggctggtatgtggtcaggcctcggggaacgtccaccggggctgtccactggctctccccacagaactgtgctccacgggggctgggcctttcctccaccgctgcctccccagggcccagaacagcatctggcacacagtaggtgcatcataaatgtttgctgacaaaaccaatttcctaacatttttattacccaccaaagaaactcggtacccatctgcagtcactcctccctgctttctcccccacggtcctggaagctcattgccccatctctgtggacttgcctgttcttgacattttgcacaaatggaatcacacagcgtgtggctctctgacttctgtcactgaacaccatgttttcaagatctatcgattctgtcatatgtccctgtgcttcattttaaaaattactgaatactattccctcgtatggctagactgcacaccacactttatttatccgtgtaggagttggtggacatttggattcttttccactttggggagaatgtgagattgtaatttgccactcttgatacatgactgaacaagttaataaaaagatatttaaatagaaaaccaaaaattattattcatttaaatttattcataagattatatgcttatttatgattctatttcctacataattgctgtttataggtatgaacataattgccatgtacacaataccatgtgccatgataaatggcaaatttctttaaggatttaaatttaaaaagaaaacgacataaaaacaagtcaaagataggaaattttttgaaaacccaaataaagaaaagccttttaaactcttattccaaaaaaaaaaaaagtttgctgaacaaatgaatgggctgaaagaggagtgatctgacaggcaggtgcagggtgagggggtgcgcgtaatgggtgtaccatacgcacatgcgcatgcacacaagcacacagtgtgtcctcaggcagggagggtgagaagagtgtgtaatgggtgtacatatcacacacttgcgaacatgcgcgtgcacacacacacacagtatcctcaggcagggtgagaagagtgtgtaatgggtgtacgtaccacatgcacttgcatgcatacaagtgcacgcgcgtgcgcgcgcacacacacacacagtgtgtcctcaggcagggagggtgagaagagtgtgtaatgggtgtatatatcacacgcacttacgttcgtacatgggtgcgcgcacacatacaaagtgtgtcctcaggcgggtagggcgagaagagtgtaatgcatgtacatatcacacgcacatgcacacacacacgctgtatgtcctctggcaggcagggagaggggtgcgtgcaataagcgcatacaccacatacatgcatgcatgctctcaaggctgggacatggaacccagccaggctgggacagaaagcgcagcgccagcaccctggggatctctctccattcaaaatcatggacttcataaaagcataggctgtgggcagagcctcagaggtttaagcaggaaacagcgactgtgaggctgggatggaaaaggcagcgactgatacagccccggctgtgtcccggtaaggggccaggcagcggatgcatgccatgtggggcctgacttagtctagacactggctcaatgccactgggtggtggggactcagggcccctcctcctccccttccaccccctgcatccaatccacaggtgagcgctctcagcttcacctccaaactcaccctccagccccctccctcccatggccaagcctaccagtctgcccccatggtagcctcctcactgtcctccccacagccacctccgtccactcaccccccaaagccaagccccagctgggccaggcactccccagctcccagaaaccacttagtgtctcatggagacctggctgtgtggcccactcctctcttacccgccacaccccatccaccatgtctctctccacgtggcaagtgccggagatcctcacccctctcggcctcagctcaagggtcaccccattttcctggacaacattttatcacagtgtgtaatcctcccacttgtctgtctcctactttgggatgttggctgtgtgtccaggctgaggccagcccagcccttcagaaagctggaggtcaccacagtgaagtgcaacgcaggctccaggaccaacgccaaggttcaaatcctgcctccccctttagcccacagtgtgatgctggatggattactcagcctcctcaatggtcccatacacagagggttgcttcgaggattaaatggatcttgtccctcatttaactacacacatgcagagggcccagaccagaggctgacacatggtcagggctcaggaaatgtccactgggctgcctgctgcctcgctgctgaatcagcatgtatgaacctacagataaggcaccaggcctcgtttctccagagaccaaatgcactattttaatcagctcaacagtgttcccccaaatttatacatcaaagccccaatttacagtgcctcagaatgtgactatttggagacggtgctttaaacaggtgattaggctaaactgaggacattagggcaggcctaatccactctgactgttgtcctgatatgaggacatctgagcatatgagagagaccccagggatgcgtgcacacagaggaaaggccgcatgaggacatggcaagaaggcggcaagcccaggagagaggcctcagagagtagcagccctgccgatgccttgatcttggacttccagccaccagaagggtgagaaaacacatttctgttgcttaggccaccaaggctgtggtcttttgtggggcagccctagcacactcacacaggcaccttcaggccagagggtggaagaaaggaccccagatccaccagtgagtgtgtgaaccaccagggcctgcactgcccatgacctgagctctgaactcgagtcccaccaggctcaaagccaggacctcagaggacatcagacaggtgtgatgagtcccttcccccaagccagctctggccacagcctgctgcccaccaggagcggcctgaattattccccgtggcagaagagagaaatccacgacctctagcctgcctgcccctgcccccaccaccaaggaagggccgcctgtccaaaccacctggaccccgcagcctgttcgggattcatttctttcctcttcaaagcattacagattgattgccaagtcttgccgtaaatcaaaagacagtcactactcattacctacttagaattccccgagttcttcctgggaagccatttctcatctgtttgatctcggagccaccagcactatctccaggcacgccacccatcacggcagccgccagacacttttttcttctgggctcctttctcagcacctagatgaatttctacctttctccagctttaagaagagctgccaagataaatgattcaaagactccagctcatgctgaaaatatatggactgcttaaagcctattatgaatcagccaacactggggagagacgcactggctgcatcctcaccggacgggtcatcctggctgctaagacctagacccacccgggcacgtggacactctctggagtcttttcacccgtgggatcatgacacttgcccagcttcaaccagcaccaggtgcccatgccatccccaagcctctgcgacctctcagcacagggtggccgagagccccacagtcacatgctggcctagcagaagtgaggggtcccctgtttgcacagtgcatccaggaggaacttcggtccccagccttgaagctgggaccccttttgcaaaagcagcatgctctcagccacggctgctcaccacccagaggggagggcccagcgggcatcaggaccccgcaccgagggtggtgaggcctttctgccacctctgctgatagggtcccaggaccacggctttccgatgtgcctcccactgtccagtctatgcgccagtctccacagccatcagcaggccccacgaagggcatctagcccctcttatcttgctgggatggacagtaagaaagtaaaacagcaccagcaaagcccagccaggctccgactcaaccagccacccagacattggctgtgtgggggactagaccgccagggccctccagcaatgaactgcggtcaccttgggctggagaagtagctatggtgcacttcgccctagctgggatgcccaggagggccacctgtgccaccgtgctgcttctgaaggttgtgacatgggaagagttctatccccaggtgcagacatggaggtcagcaatcaccactcaccaatgaggggaccccaagtgctgtcacaggtgcatccacaaggcttgtggcacactcatggagggtggccccaggggaacactgctgcaccagtgccggatgactgtgggtgaggagggacacagactcatggaccctggggctctgcctccacaaaacgggcttttctaacaagagggtggaattcacatgaaggaagctggctggttctgtgggcagcagtgacaatgaccccagatccatttcccgctgtccccctgccaagttcctgcaggtgcaggagcccgggatgcatggcagtgacaatagcatttgtgcaggcagggcaggggcgtgctagcccaggccaagtctgaggcctgtcactgacatgggatggagcctgtgcccaccagcagcctggctcctgggcatctaggcctgttcaaaacctgtaacacggaagccaacagaaatccacagccagagggagctgcgagaggacggtggctgagtgggtggggccaggccagtttccctcctgctcagccacccccaagatgcttcctcaccctactctggggcagctgaagaaggcagctgtggccaggcccatggctccctcctggacagctgccagaggaagcacgaagacccacactgcccatcctccatgccacagacagagtccaaaccctcagcctgaaccacaaaggcagaggatggccttgtgcgggaggttcctgaggacgcaaactcagcttcacagccccggaacacagagcctgctgtcggagtatctaacagggatggggaggagcctcaactttggttttatcataaattacctccaggcttcaagagcagacatgcctgccggcaggtatggagacagcccttcctggatgaaaccattcatgtcatccacagaactcagagctaggaggagaaaaactcacggcccggaataattactcccgcagggagcgtctttcgcaccagcaggtgataggtctggatgaggattttctaaaaaccggcaccaaacctcacagcataatcactactgcctgcctgttctgggagccaaacctcaataactgctcctgcggggctgctcctcactagatgcgcccaggacttggagccacgccttctcacgggcagaaccagacaggacacagccacctccgaggtgggcgtctggtccacctgcccagctaaacaccctcccatctaccacgggctccttccggcatggaagaacaggaaaggctcctttagagtgggggaccagctccagaggcctggaggcacccacaggagtgaagctggccaggtagtggcatgcaaaacagaaaaaaaagtctttttttttccccagagctctcctatttttcttgaaatacatgaccctttcgactatcttttttttctcttttgatagagatgctggtatgagaaggctttctcatttatgaaagaaccaacagcatgaaagccatgaaaagagtcggcttcagtgctcggggaggtgacggggagcggtggggcctgtggcgtgcaccctgaacgaaagctatgtagcaagcaccacgctgctgctctgtggaaattccagcccacggttaccagctactctgattttcaggaaaagccaaaaaaatctgatttttcaaatttggttgacttcaatgaaccaaaataaagtgttaaaatacctattgcctgggccaaacggaaactgcgtgtgtactggatgtggcccagaggccaccagtatataaactctggcctttctcttgctagaaaattcttcctggagaatgagaggtggggacccagggtttccccacactccccaaccaagaccctgacgggacagaggcccccagaggctgcagtccactctcacaggggcctcgggggaaggcaggcagcaaatgggggtgtggccaaagccaactccaggtagctggcccactgtagagaagacatcttccatgtccaccgaggtgactcggtactgtctggaccacctggtgcaactcatagccccctcctcagctcctctggggtcgcccatcttgcacagtgaacctacaagcaacctaaaccgttcctccccctttcttctgggcctgagcaatttcagcagagccccgcatggtggggtcaatcagacagctcttggccagctgtgcagaaagagccagagaggtctcctgggtgaaaaatgagaggaaacctaaaaagatccaccagcccatgttttctcaggatccatgaggagagctcaccggagaagcctgcgccaaaacaggaagggaccaagccacaaaatgcacacaagaaaacagcagcagaacgagtgtgcagggtcacagcaggagaatgggagacaggcttgagtttctcactggtgcgcaagtggacatcatgagaggaagctaacagccccggatcacatccaggagacctagtacgtgaggaggaggaatttcaaagatgaccctgagatgcagaaagctttcactgctcagatgaaagaagtcggtcatagactatcgcaggtgctcacagggaccaccccaggcggtgtcccaatgtgcatggctccgatcccagcgggtgccacgttaccttctgaaactgataaggaagccacagagaaaccagggaatgaaatctgtccggggtgacatgatcaataattatatcacaggtctcaggtagcaggacccaaggggatgaatgcttgcctctgggagtgaccagggaggtaacagacaggaagcagagcatgtgatgcccccgcttgggtgcaggagtggccactgccactggcctgtccactgtgtgcagaccagccttgctggtggccaagctgcctctgtctccgcagatctgtcacatgcaccacctggtctctgtgttaggtgtgactgcttcttcttgactttttatcagtctaggtcagaacacacccgatgtgaactttatggcctgagttgctcgtccctccagaccccccgtgctgcctactggctgaagaacttggaggctaagcaagccccggcttgtgccccttcccaaggagcctgccttctcctggtcctcccagacagctggcaggattctaagccctgaagtgcagcccctgcccagaaaggcagtgagacagatcctcaggaaatactgttacttccaagaatcaatagtcctataagcatccagggcaagaaaatgaaaagttccctggaaagaaggaggaatatgatttgctaaagatctctggcaacaaaggagggaatggttttatggaacaaagagtcaatacccactgaagccaccattcacgcaggagacaacaaaagaaccctccaacaagcaaggcactgaaagtactgaatcaaaacttaaagcactcacacgagcaaagggaaaacatggtacaaaattgaggtccacattggattgagtgagacagtgctcactaaataaccgttggtaaaatgatggtaagacaatgcaaatgttgaaaataaaggaaaaagaagttatataataaaaaactagaaggtaggggaaagggagattataaagtaaaactgaggcaggaggcgggacttgactctggaggcggggctcggacaccagaccaaatggagaactagccaaaacaggtcccaggtaaaagcagctttccatcagacacgcccaccagtgcgccatgtcagtttaccattgtcatggcaacaccagggagttaccacccctttccatagcaatgacttgatgaaccaaaagttactaacccctccctaaaaatgtctgcataaactgccccttactctgcatgtaattaaaagtgggtataaatatgactgcaaaaccgccctgagctgcggctctcagcacactgcctgtaggtagccctgctctgcaggggtagtcacggagctgtcacaatgcctgaactgtaacaccgctgctttaataaagctgtttcttcctaccctactactggctcacccttgaattctttcctgggtgaagccaagaaccctcgtgggataagccccactttagggcttgcctgccttgcatcaaaactatgctaagtttctaattttttaaggaaaattttctagttttttaaggaaaattagaaacttaaaattgttaaattgttaaaattagaaaattaaaattgtttaacttttgaacataagtagaaaacagaaatacaggtctttttttcttgatttaaaggtgattctacatttaacatggcatacatataaaagtgagcaaaggaaatttcaccaaccttccaaagatagaaaaacttttttaaagccacaaaggaaaaaacagaaaccagaaaacacaaaataaggctgtagaaaagagaacagatgctgattatcactgtgaattcaaacagctctcctaacacggggaggctctccatttgaacaatgagtatgctgcaccttataaacaacctattttaaaaagttaaaaatacagggataagcaaagatatgccaggaaaatgtaacaacaacaacaaacatagcaacaccagtgtcaggcaaagtcagattcaagacatagattaaataggttaaaaggggtttcttgaaagctataaaaagcaaaatatataataaagacataacaatcatcaacttttatgcctcaaacaatttatcatggaaatgagtaagacaaaatctatcatgaatcacaaagaattataaaaccatctctctaaatcttagagcaaatatacaaaaataggggagggggcagaggactggaattagataataaacctgattcatgtacaccaaagtatatattctaaagataaaaactaaacactttccagtattccataaaatactgaccaaaatatttttaaataagccacgaagaaaaacttcaaaattaaaaaccaaaaagattcacaccagctgcattctctagctccaatggtgacagaactagcagctaaaaaccaaaaggtcaccaagaaaaattcaaccacatctactgggaaatgaaaagaaatacactaggttagttcttaggttcaaaaacaaatcactctagacataccaggatatagctaaggcagtattcaaaaataaactagccaaaatctatttattactaaagaggaaaaaataaaaaataaactaagattcaactaaacaagttaaaagacagatgcgtcaaaacaaggttcaggaagagaggagaaaggaattaataataaaactggaaatcaatgagtttgaccaacagtagaactgaaaaataaatttaagagctgattttatgaaaaggccaataaagaagataaaactctagcaattataatccatagagaaaaaacacaagttacattaggaatgagaaagaaaaaacagctacagatataaaggagatattttaaaaacataagattttaaaaatatatgagaataaaattggttacttggttacaatgtaaaatctttgatgaaaactaagactttataggaaaacatacttactgactctaaaagtgatgaatttggactaaaacaatcccataggaaaatctgaaaagttaccaaagaaatcttccccagagaaacaacagggtctgagagattcaaaggacttcatgccttcaagaaacagccaagccctatgctttccaagttgtttcagaaaacagaaaaacatgggggtgcttcccaaaacatgatctcaaaaaccttggtctcaaaatatggctaagagagttaaaggaaaaaaatatatagctcaatttcctattttgagcctgtataaaatgctagtgaaaaaataacaacaatggccaggcatggtggctcacgcctataatcccggcacttcgggaggccgtggcaggaggatcgcttgagtccaggagttggagaggcaatataatgagatcccaagtccacagaaaaataaaaaattagccaggcatggtggcacgtgcttctagtcccagctactccagaggctgaggggggaaggtcacttaagactgggaggttgaggttgcagtgaactgtgattgcaccactgccttccagcctgggcagtagagcaaaacactgtcataaaaaaataaataaataaataaataaataaaaaagcaacaacaagcaccataaggatgcttagtggatgtccatctgctccatgtgttatgcatacaggcatgcctcatcttaccgtgccttgctttctttttttagaaattgaaggtttgtggcaaccctgcgtttagcaagcctactggtgccatttttccaacagcatgtgttcactttgtgtgtgtcagcattttttagcaataaagtctttttaaattatggcatgtacattgattttttgagacataatgttattgcactcttaagagactacagtatactgcaaacataacttttatatgcactaggaaacacgaaaatttccaatatttgctttattgcagtagtctggagctgaagccgcaatatctctgaggtatacctgtatatcaattcattggatcctcctaatcctcctatgaagtgctattatttttttccagatgaggacactgaggtagtgttatcaatgtgcccaagctggtaatcagcagagctgggacccaaaccaagaacactagtctctggggaccatgctctacccactctactatactgcctcctaagtcggcttcttaaagtcctgataaaccacaataaagtagtgtgtactgggatgcctcactggctctgcaccaggacgtctggtcataaaattcatctaaggtgcacccagcacccaatcttggtttctaataccatcctccaataaaaggaaccgggctccttagtgaaatggctaactctgaggttggagcagggaacagacaagatgagcccggtgcaacccgcaatgccagaaaggaagggaatgctccaaaactaaaatgacggggtgcatcagaaagacacaggagtcaaacgaaagagccctcgatgcccaaagctggaaggatttgagcatcacagaatactggattataaagtataaaataaatatccatgggtctatacaagttttttaaaaaagaggccaggcgcagtggctcacacctgtaatcccagcactttgggaggctgaggtgggaggatcacttgagggcaagagtttgagaccagcctggccaacatggcaaaaccctgtctctactaaaaatacaaaaattagctgggcatggtggtgggcacctgtaaccccagctactcgagcggctgaagcaggagaatcatttgagcccaggacgtggaggtcgcagtgagccgagattgtaccactgcactccagcctcggtgatggagcgagactctgtctccaaaaaagaaaaaaaaaagaaagaaagtacaatttcaagtttaaaaaaaaaaggttgaacaaataaataaatgagggagaagagacaaatgtgtacagaaggatcacaaatagcataattcccatgccttaagtgtgggtggcacacagtgactgctttccaagagtacagaagagtgggtaggggagtgactttacagtggagaaacctgacaagcactaccttagccaggtgatcaaggtcaacatcatcagtgataagtcatgctgatgtgatgtgatgacaatggcacttctgtgctctccttcccagtaactcataactcctgtctcgctgaaagaaaaactaaaattgaaaggcattcttcaaagtacctagccatactcctcgaaagtgtcaaggtcatcaaaaccaaggcaattctaagaaactgtcacagcccagaggaggctaaggagatgtgacaatggaacgtgatatggtctcccagatgggatcctggaacaggaggagggcattaggtaaaagctaaggccgctggaataaagcatggacttaagataataattaagtatcaataacgtgcatccatggtaacaaatgttctaaagtaatgttaataactttactaatacataatagggaaaatgggtgccaggtacatggaactctctaatgttcctgtgacttttccgtaatccaaaactatcctaaaataaaaagtttactgattaaacacacacgtggaaaaggccaagggagatgctgaaaaggcagctgataaaattcgacatcctttcctgataaaatctagtaagccaggaagacaatgctacttccttaaactcgtgataaatatttatctgaaatcaacagtcagcatcaggtttttggcttttttttctctttttttttttaagagatggagtctcactctgtcgcccagatgggagtgcagtggtgtgatcatagctaactgccgccttggcttcctgggctcaagcaatcctcctgcctcagccttccaagtagctgggactataggggtgcgtcaccacactcagctaattaaaaacattttttttttttttttgtagaggcagaggtctcctatgttgcccaggctggtcttgaactcctggcctcaagcaatcctcctgccttggactcccaaagtgctgggactacaggcatgagtgtgtaattaccatgcctggcaatatcaggtttaatggtgaaacactagaggaaaatccataaagatgtccacagggagcacagttccttatgatttctaatatgattctccaggagcaatgcgcccagcatttgaaaagacaatgcctatttatgttagttttgccccaaaatctctagtccttcatcgaccaggttacacatttgcagaaagctcttctctctggttctctgtccagctttctggctggacaccaagttggttttctccacatgcccattcctcagttactcctagaggcaaaatgagccatccctgctttaagccacagggtcccacagcctgaccccgctgagagccccagtttcattctcggatccctggctctgtcgaatctctggtggagagactctccacactcgcctgtccccaactccctccctcatgccaagtggtgtagacacagcaggatggacgggcacacaggacctgccctgccagcacagggtaggctctggactaaggaattctccacccaagacagccctggctcttgggaagggctcagcttaaatccccctaggcatggccagccagggtgcaggactcaaggactgccctcctagggcttggacacgcagatggtgtttcctgactgctctcatgataggctggggcccgtctccaacagccaagcaagtgctagcagcaaacctactccaagccacctgaggcaaagagggtgtttctccagcccagacctgtgtctgaaggggccctcttctctgaatgggctgtgccagtgccctcacccatcaacacagccttcagagaaaggatgtgtctgctcagcgggtgcagggtcctgcccacggacacacagctggtccccagggcccatcacatccattcttacctgggggctccggtctcagaggccgcctggacccagacttgttccaaacagtcctcaaaactgcagcaccctttgtgggggtggctaaatggatggcagtctcactgatgcccacatttgtccaggctgagagcagattaggtcagactgtgcctggatgatggagactgcatctccaggacctcccggaggaagacggggacctcctagtgacttccctctccagtgaaacctgcgtcctctgcatgccctgtgaggggccccagccctggtcagagacacacaaggtgtctcaccatccacccagagtgcccggcaacacagcctcgtgtagccccacacgggaggaggaccatgtgggcacaggcatccgagatacagttcttcaggagtcgctgcacaggagggactcggatgaaaagcagagggtgccaggccgggcatagtggcttatgcctagaatcccagcactgtgggagaccaaggcagcaggaatgctagagctctggagttctagaccagcctgggcaacaaggcaaaactctatctctacgaaaaataaaaaattagctgggcaaggtagtgagcacctgtggtgccagttatttggggggctgaggcgggaggatcacttgagcccgggaggcagagattgcagcaagcagagatcgccccagaggggcgtcctctctgcggccccacgccccctgcagtcctgagcactgtgggctggcagggatgaggggggctgcccacagactctcccacctcctggctgtccttactggagtcaaagtttctagtcttttttatttacttattttgagatggagtctcgctctgttgcccaggctggaatgcagaggctcactgcaacctccacctcccaggttcaagtgattctcctgcctcagcctcccaagtagctgggactacaggcgcccgacacctagcccagctaattttttgtatttttagtagagacgcggtttcaccgcgttagccaggatggtctcgatctcctgactttgtgatctgcctgtctcggcctcccaaagtgctggaattacaggcatgagccaccacacccaacacccaaccagtttctagtcttaaaacaagaaaacaaacaaacaagcaaacaaaaagagaaaaaaatctgtcctgtttaacaagaatgcagcaaggattttgcaacctgctcccaggctggattcacggagagctccaaccccgcccccagcaccctcggctcgggtggctctgtatgggttggggggcgggtatgtatgtggtatgtcaatgggtgtggtacataccgtgtatgtgaggcatgtggtgggtggcgtgtgtatggtgtgtagtgtgtgtatggggatggtgggtacatgttgtgtgtggtgtgtagcatatgtggtatgtatggtgtggtgtgtgcatatggctgtggtgcatgtgtgtggtgtgaatgtgtatggctgtggtgtgtgcagggtattggtgtatgtggtgtgtggctgtatgtggcatgcgatgtgtggtgtgtaggtgaatgtggcatcagatgtgtggtgagtgtggtgtgtaggtgcatgtggcatgcgatgtgtggtgtgtgtggtgtgtaggtgcatgtggcatgagacgtgtggtatgtaggtgtgtgtggcaagtgatgtatggtgtgtgtggtgtgtatggcgtgtcatatgtatgcagtatgtggtatatgtgtggtgtgtgtatggtatgtggtatgtgggggttgtgtgtggaggtgtgtatgtgtggcgtacatggcgcatgatgtgtatgtgtggtgtgtgtgtggtgtggggtgtgtgtgtggtatgtggaacgagtgtggtgtgtgtgtggtgagtatggtgtgggcggtgtgtatgtgtgatgtgtgtggcgtgtgtgttgtgtgtggtatgtggcatgtgtggtgtgtatggtggaggtctgtggtgtgtggtgtgtggtatgtggcatgtgtatgtgctatgcagcatgtgtgttgtgtgaggtgtacgtagtgtgtatggtatgtgtgggggtgtgtgaggtgtgtgtggtatagggcatgtgtgtggtgtatgtggagtgcgcaggatgtgtggtatgtggtgtgtatggtgtggcgtgtgtgtcatgtgtgtggcatctggggcatgtgtctggttgggggagaccctcaggtcgtgtcccctctccccagcccatctgtactcgaggggcgctgggcacacagaatcacaacttgctccatgtggccaaagagtaagaaaagcaccaaggccttgaatgagaaggagcacagctgggcaagcccctcactcacaagggactgacggggacaggagctgcgattgagggctgtcgcctgtggcaggagcgcccagaaaagcccaggcctgtggagaagggtctccagtgggtcttggcctggaaggggacgccaccacacggtacccgtcacactacacagatcctctccctttcccatgattctcatgaccccccagaaacaaaagggccccaaatgccccattcacagctcagagagaaagagcataatttcaatcaaggtctcaggctgtcatacacatcgcgttattaatctccttgtggcaaatgtgagctgggactcgcttacacagccaatggagcatgctctaaattagcgtttgcaggtaatggatccggccgccagccccacgccagctggctacaagctgggtacgccactaacatgaaataataggaggcggaaaaacggatggcctgattgggcctgctgttagagcccaatttacccaacacggacgtcttattggtttaacacaatttactacacctcaattgcggaaaatgattttcattcctctgaaccctcaactcccaggcgccgcatgagggaggagtcttcataaatgccatccgctcgctcactttttttttttaacatgccttcaagattttataacaaatcatagataataaaacaaaaacagatgaggcttagaactggaggtccaggccaccatcgcttgagtcctggggtgggtggtgtgtccaccttcgagaaaaccagccctgactcctgccccgagtcctgaactgcagagctccctgccttcatgcccagtgtccctgtgcaaggctgaagccagccaggcccccagcagaaagtccagcaggtcttaaggatgcccaccttgctcacagggtgctgtcaacacatatagaagagcggctggtttcctttgaacccagtgagtcagcgattcacacagcagtgcagctgccccccagccttccctggtagcagttgagcctgtgttcaaagaggcacacccccgggtaaccaaaaacacgggctttagaagagatttttattccccgactagttaagaaaagaattctcaagttcccagtgacacagaagatggcagaaaaatcacttaaaaccttttcttctcttttccacccacatacatttcccgacacctacagtgggtcagacaccgcgcagataaatgagacatggtccccaagaaggcgcctccaggctctccaggacaaggaccacaaaactgcatcacatagtgatcctgccctggagagggagctcgaggcggaagaagtgtcagcccacctccctggctgcagatgtccccaggggcttcaacctggacactggcaatcggggcgcctcctcaaatctggccagggatactccatgatgtgacactttccccagacacccatcttcccaccatcttcagagggggtgacccctctctcccaactcggtcccctcaggaacagcctccatctcttgttcttcctgtctcagtccccgtacccacccccctgctctaagctctcaggggcccacagatcagatagcttccctggtgggcacggtttcccctccctatgtcctgtggcctgcagcaggtgggtgcacatggcaggtgcacagcatgggcagcaggtacacacgctgacccgatgccactcagcaccctgtgggaggctgctcctggctgagagcttcccggtgcactcggctgtggcctctggcttcgagctcatctctccaagagccactctggtccacgcaggaggcggcagcaaggccaacccagggtcttgggatgggggtggagggaaggtggagcagtttgtagacaggggtgacatctccccagagctcaggttcacgacaccctgcttccaacagcagccaagtacaacatgtggactctgtgtggatcctgacttgaacaaaccaatgctaaaaagagtttaggatcaatatggactagatattcatgacatgaaggagttacggttcgtttgtgataatgaatgtgatattggcatggtggttatgtaaaagtagaaaaaagttctcaccaactggaatacctactgaggtatttacaggtgctatgacacgatgtctaggatttggctttaaaatgctctagcaaacaaaactaaacacaaaaacctggtggggactttggggttcattatacttttctattattttggatactgaaatttcctgtttaaaaaaaaaaaaagacctccattacctggaaggcatgagggctaaggaacggcgggtattccaggtcccctggcccctgacccatagcccatgcagccctgtccccaggttgggcagggtcgggctctgggacgctgtggggagggaggctcagggcccctcccagtagccaccttgggagcaggactgcctgcagcacggggctcaagcagccagcatgcagaggacggcagggttccacactgggctcagctattcctgccccaatttctcagttatttttatttgaagcatcagctatgggtcactgtgattcaactcaagctgggacaggtttccggggcagtgccaatctgagggacccactgtccagcccacctcgctggaggagccccacaacacacttcccatcccagatcctcggagcgggcagggggtcctgggaatgctgggccacagacaccgcactgcagaaggagaccacgcagacgcaagtgctgggatagctctgcgagcccttctcagcctccccggctgacggagctgggcttctgattaacgtgtgttacacggcccctcccaggatgccaagcacctgggtcaggccattttaacctcctcctgggcggggtaaggagagaagcacaggcactgactgctcagaactccttccagggcaagaccttaaaaagacactcgtcccctaagcacagccacagcgaactgaagcatccaagcagcccactacgggccccatccgacctcggccctgcaccccactgatggcaggcaggccagcctgggagggtgatatggagccagcacccccagggccggggctctgaacagagcaggccctgaggacatctggggtggacttgggccctgcaaggggggtaagggataccagaaaccaagctctcacaaggacaggcaggaaaggaaagcccagagtgaggacatggggatggcagcctcttcagtgtcacctccccagagcttccaggtggtaccaacactggtgggaggtctcggaatgggggcctcctgccccaggacacgggtgggaagggagccactgaggcagtttgggtctgacccaaaggtttccttgtaccatgggtggcagcacactgacttctgggtcctggagcggggctgagctggccaggccacacccgccacggctgggcagccgccggaagctccccgggtgccactggctcgctgcagccctaataggagcagaaggccaatggagctctccagagctctttatgggccatttaaccatccctcaacccagtcgcccgagcacagcagacataatggcagtgtttacacataaaaacggcaagctgttttactggcggctttcagagtcataagagcagcaatttggtaaagtttcctgcaaatggcagaaacaaagtccgagagtagaatggtggggcactaaaccaccctgaaaagtcatcgaaaaccattacatcaaacactctgccaagagccagggaggcgggcgcagtcagaagaaaaataatctttgcttgtgatcctgaagccctgttcataatctccgctcacggtgtgtgtgccactgcggcgtctcatctgttactcactcagggaacataaattactgttttttaccttttaattttacccggagaaacatggtggcttacctttccaactcatattctttcattcccacttttacagccttcattacctggaggacggatattaagcaaagacatttgtattaagcagatcagtaacacagcgtgataaataacatacagcacttcttcaaaagcacctcttctttaaaaaggaaaaaaagaatgatatgtgcatgcagtggtacagacatgtgacaaattagaactttttaaaagctccaaaatccatacagtttatttaaactgctatgaagcacttccatttggaagccgataaatgccatgcctcaagttacagctcagaggccaccagcagcccgaggacagtgaggatttaaccacgaggtgcttggtgaatacttaatgccacgaaagctatgacgatcactaaaaggcctcctttgtttaactttcataaaacacggagagcattatctcgtacaacagagtacgctgcccatcaattacccttgtctgtttcctaacacaaaactgcaatgttcctgagcagacggtgggccatcctcatctttcaagacatgtgtttccttatttggtctcattcctccagtaaagcgggaaggtttggaagagaaattttcagaaaatggatgatggtaatcagtgtgtttgaaccacagttaaggacaaaagattctttaaaatgagctgagaactgctgggatatgaagaaggagcactctaccctcccagaattgggactttttgttggataatttcctgaggattagtgtccacgactgcatgatgggcaggtgccctaagctgaggaattggggcagagccccttctgtccctgccctgtgcccaccagggaacagaaaagagaacaatcactgtgtaaaacttcctacctctcacttggccctcagggattagagcccacctggaaacccttcatcctcacgcagttctctcgccacacagcaacactgctttccccactcaaccagagccggtgcctgacttacctcacggtgggcctcgctggagattttattggtatagcgcagaacctccagctccatatccgtcttaaacactcggcttcagagacagaagaacaaagcagcaaatcagtgactttcaggaggcactggctggacccctccagggagagctcagggcctaccacaccctgcacagcccagaaggcgtgttgtgcaaggccagagtggggccaccaaggcccaggagtgacaagctccatggaacagtctagaagaaaacctctagcagggagcagagctgctgcccaccttccctaacaccagccagcgggcagactgtttccagggataagatctggaagccgctgcggtgggagaagaagcctggttgctgcagcttgtcacaggctgcctccctcaacctcagtttccccatgcatggaagggggatgaaatctacatggcatggctactgggccataatcctaagcctgctgcctcccagggctctgtcctgttggctgaagaggcctcgtttcctccccacccccacccacctgcccacgggtgggtgacagggtcaggtgaagggacagaagccattccagtttcgtgtgtgctggtacaaatgtggaaacagctggacagcagacacagcaggagaccaggagcagagaagagggaggcagccacagatgagagggtggtctacgtgggcaggggagtcacaatcgagggaccctgctgtcccttcctggctgggctgtgcctcctgcaactggactcctgaggcttccaggtcctcccaacaaacttgtgttaatttgcccaaatgtggttaggtttctggtggttgcaatcaatctcacccgcgagtaagacccacagagaggagccaaataagtattcgttttctacctccacccatttaaaaaaaccctgggtccgcgggcacagaaagggcagccatgctgaggcattcagagcaccggcctgggagaaaggccctgggctccagttcagctccaccccttcccagcggtgtggccaagatccctactctgtgcctcggtttccccatctgaaaaacggagatatgaacactgttttcatcataggtttgcagtgagaacggagttggcatttttaaagcactaaggacagtgcctggcacacagtaagtgctgtgtacacttgttccagaaaccaagcgaaatgcaaagcctgcagacaccacgtcatccatacttcccaccccaaagccaggtggaatgctctgatgtccttaggtaggacatcttgattctcatcaaaacattactccccagtattcatgacaggcccacaaagctagagaaatctcagcaggcaaacgcagcttcccttcactttaaattgccatttactggggacccgccgcatggtgggtcctgtaagttgcagtggatgctgggtgcactgcccaactcatcccctgaggccacacccctctactggtctccttgattcgatggagggagccaagactcagctccctcgcttcagctggggacatctctgggggccactccagcaccaaaactccccatgggagcagctgagatgcccttgtgacagcatcgcagcccaagcctgctcccttactctgacacacacgctgatcctgagagcactcctcaatacgcttcctgcctacttggctcacagactcagcttcccatggaacccaacctagaacaggtactaccttcccattttacagatagcgacactgagacttaactgagacaatgtcaaagagcgcatgacccactctgttacactcaccccctttttgttgcactccatgcaaaaattatagaaccctacacccagacaaactactaaccaaatacagaaggaaactagtcctttttagacattcaaaaactcagaaattggggaagtacttaaggatgtactccagcagagagagaagggtagaagggtggggagagggagaaagcacaagccaataaagagaaggaggtgatataatgggatatttttaaaaactggagtcaatccaaaagtataattagacactggacagcaagcctagaaagcaatcagtagaaattagaactccaagtatgtggctctgagaaaaacatccacaaaaagaatggcatggattcctttctgcagataaaatcaataggaagcttaaagctcttagtgatatggtgaagaagatatgtttcttctctcaataagaaagacgaaaggcaaattaaaactctaggaacaacaaaacaaaacagatatatgtatgaaggctgcatttattcacatggtaccaaagtaacaccaggtagattactctccaggtcaagggggaaaatgtaacccagtgatcagtcttagcatcactgattgtgggtcaactaagtataatttgtgtctgaatgcagtgcaataagaaatacacatcacctgggatgtattctggcaaatgttttaaacttctatggctttagatctaacttccagtttgcaggaaatatggggatagaagaacaagctaaccaccaacacaagcgaacaaccatacaaatccagaattgggatgctgtggtacaactggtccagcctttcagtatctggggggaaaaccatcacaatacccaggtaagagatagaactatattggccacgtccaggatgtcttatggacaactggaggaattcctgtttatgtgaactttctaactttcagcaatgcatgtatatatgttgcttttgtactaatgaaaaaaaaaaaagaaataaaaatttttttctaataaaaaaaccattctttaaacagagaataaactaaaatatggagtgattttgtatagctggtggttatataagaaaaacagtctaggccgggcgcggtggctcaagcctgtaatcccagcactttgggaggccgaggcgggcagatcacgaggtcaggagatcaagactatcctggctaacacggtgaaaccccatctctactaaaaatacaaaaaattagctgggcatggtggcgggcgcctgtagtcccagctactcgggaggctgaggcaggagaatggtgtgaacccaggaggcggagcttgcagtgagccgagatcacgccactgcactccagcctgggtgacagagcaagactccgtctcaaaaaaaaaaaaaaagaaagaaagaaagaaaaagaaaaacagtttatgtgctcttgatgctaggagcctcctcttgagggaggccctgggcttgtgacatccgacccaaagagaaggcactcccgccctgatacattccttagttctgcatagaccacggtcacagtcatcatagaaacacagttttatggcttttttttttaaccttttagagttaatgtctcccccaaacaggtaagatttactgctcacataaatgcaatggaaatattacaaaccctaacaaggaaacagcaacagaagtcgggaggtaaagacgggttggagaaaagatgtgtagagagagcagggccccatctgtgcagcctcagctcacccagggcaaaggcaagatggggtggaaagttcacggagcaagaactaaaggaggctcaaatgtaggacaagaaggcaaatggaacccatggaagaaccagcaataaacatatgatgaaaagatgggtggaggtgacagaaatggcccaaagaattcgctttggggaggggtggtgtggagagagatgagctggcaggagtcgctggtttcatgataacctagctttcccgtactgattttgtactagtggctttttaaaccaagggtacatattgctttgatagcactttaaaaaccttaatgaggtgctgtccataatggtaaatgtccattcattcatttcacatcactaataagtaagtgttagctggatgtaccaggcaccggtgatggagtggagtgaaagggccacgtcctcccctaatggagcgcagagaccatggagagacggatacagcgcgagtaaacacacaatgatggagtggaaggagggctgctaagagcaggagccggggtgctatgtgagggaatgatggagaggcacgagccctttcggtttggggctggccacccggtgagggaggtctgtaatactgagagacctggagaatggaggtgggcaacccagctgagtccctctgcacaaggcagagagttcccggtgcaccccctggccagctccttttcctttactaaagatgacttacctgcaccaaagctcccaaaggcccacccgtgactctcacaaaggtatcaatgcaaacactctcaagatcagcaaagctggagtgtctgaggatgcagaccagcacccacccctctgttgggagcaaagctggggtgtctgaggacgcagaccagcactcgctcctctgtcaaagggcacctctcctgcatctcctcttcctcctcctcggcctggccaagagcccacctgagctggcctccatcgaggcagcccagacagaggccccgaggcaggcgaggatggcgggaatgcgaggggcctggtggctcccccactcccatcagaggcagcaagcccttgggaacttcaagggagcagcccatgccagccagccgctgactcacacggtctccgtgacgctgcacagctgggacagccagccatttgtcactgggaaacgaggcgggcaccctgcagcgcagcgacaccttcccgagaccacagaaccttctggggaatgtggaaaaaacaaacccacaagcccagggagactttctcgaatgaacgccctttctctcggcggaggcagccctaaagcctgacagcatgctgttaatcatcatgaaggtgtctctgatgccgccgtatggcgggtgcagtcccattatctgggaccaggcacttgctcctgtccccagagggtgacagttcagagccatgggcaggacaggggccagcagctcaggctcccgaggtccgaacccacttgtggtccctcaggtgtcattcccactgccaccctctatgacgccagcccggggaacccgctgtcagggagcaggtctctcttctctcaaatgcagtgatgatcactgggtgacagcatgggtgagggccaggatctcccgccctccaaccccttactttctcctggagccgccctctgccttcattcggcttagatccctggcccttctctatggccactactgttgccagtgctgtagactcctcagccctgtgcccacccatccccacaggctcggcctgtgcctgctccaggagcactgagcactgccaggggaagtcatgcactggcaatggccaagcaagccccagtcacctcagcgaggccccagctctgccgtgagctgcaggggaacccgcaggagggctattctcaacttcccgcaccttccgaagatatctacccccaacttctgccccccacgggagccgccacagatgaatgaattccactcctacttcttggagcgcgcagcagccagcagatgggtccactctcacctctcctcctccaaactcccaggactccccatctgtcctctcctccctcccttttaagggaaggtgcatcctcttcccaagctcacacgcccacctggggatcccagctccaacctccaccagctcctgctagaagctccatggccaccgaaacagcttcctctacaagtgaagaatcctcccctcacttgcctccttctcctcttccagtcaagcctcccctacgctgcctgccaggccctaaccgtccttgccttgggggaggagggaaagcagcttttgcgttctattttgaacttcctccccatctcctcccctctcctctcccctctttgcttctctcttcacccccatcatgctgccagccctcccctccccttctcgcagaaggcgtggttccctctgcctctccctgctttccctctgcacccacctgtgggtcctgggtgccctggagctcagtgtgcgagaacccccaccgtgcccccatctcaatgaggctctgccatcttcctgctgcttcagcagagacccgggcgtcatcctagacgccctctcccatcacatccatccgctgcttcccacatccaattcacggccaagggctgccactccccctccacgacctccctcaggcccccccatttctctctatccagccccagcctctctggcctggacaagccctccagcctctaggcctccagcccacctgccctgatagcagctggggatctttaggaaatgcaaaccttatcaggcttcccctcgtttccagtggcctttaggtttccagtggcctcaggatgaaggtaaacctctagtagagcacaactcacgtaggtgcaggccatctccaccactcaccccatgtgctctcccagcctcctccctcctctgcctggaacttgttcctgcccacctctagcacccacccgaaacacacttttctaggggtcggagacgacccccttctaccctcccaccctgggctaaatcccttctctgtgttccctgggtagtctagacgaatcctcagaaacctctaacacttagaattcttttaatttaagtctcttctgaaaggccatatatagtcctggaagacagggtcccagcaccggcacagacacacagtaactatgtgtcatcaaagctacctgtccttccaccgaagccagacaacagctcatttccaacaaggagagctgatggcctcatttcaaagagaaaaggaggcctctccacccaaccttccccaccccatggcagcatgggatgttgccaaaccgggcacagcaggggcaaagcctcctcaggctccagcagcccaaaatccctctgccactgcctcgtcccagtcccacaggtaggaagagcagcccagggtggaccacaggagcccacactcccaggctctccactctgcctcccactgcagctggggcatcctcctatggtgatgagcaggaagaggtcgtaatctgccaaaggagaaaggaccacatcctcctcccagcagaggtgataatcatctctgccatcgaggcccagggacctacttgcttttctaatcttactttgggggaagtggaaaaaaaaaatcaaactgaaccagggcaaattattctacaaaggcagttctctgatgaaaccagcctggctgggctttggcctggcccaattgaatctatgcttaaatagacgtctgctgtgtgctggcttaaccaattatccgtagggcactctgggcctgaagtctcacccaggcgccaggcatagagggatgcaccccagcctggcctggttatctcacagcacaaacaccagaaactgtttttaagataactgtagaaaagaacaggattttccagcattccgcgcagtttctccctgtcttcaggaggaatgcaccaccctgaatatgatgagcccatttccagtgttcttgagcatgaacagatgaggacaaaagggtgccccagcctccgtgggtccaccggcccctggagtgagagatgcatggtcacactcagtcccagccttgtctgccccaggggatgtgtggggtggttgttagaagtatgatctacaaggctgacagccccatgagaggacaaaggccacctcctccaggaagcaacagagaatcatggctcaggacaggatgacaaagatgccacctaagaagtttgagcaggccaggcatggtggctctcacttgtaatcccggcaccttgggaggccaaggctagaggatctaaggccaaggctgagcacaggaattcgaggccagcctgggcatcacagtgataacctgtgtctacaaaacatttaaaaatcagccagatggccaggcacagtggctcatgcctgtaatcccggcactttgggaggccgaggcaggtggatcacctgaggtcggaagttcaagaccagcctgaccaacatgcaggaaccccgtctctactaaaaatacaaaagtagccgggcatggtggcacatgcctgtaatcccagctactcgggaggctgaggcagaagagtcgcttgaacctgggaggcggaagttgcagtgagccaagattgagccattgcactccagcctgggcaacaagaacaaaactccatctcaaaaaaaaaaaaaaaaatcagctaggcatgggagtgtgcacctgtagtctcagctactcgggaggctgaggcgggaggatgacctgagcctgggagtccgaggttgtagtgagccatgattacaacactgcattccagcctgggcaagagcataagaccctgtctctaaaaagagaacttggggcagaagtcagctcaggctctttggccaggaaaaaacgtgccaggaaatgtgggcactgcacagcctcacagagagtccccagctcatggccacgctgtgggcatcaacatgcctggaggctgctcaaacagacagggaggctgggaggcaaagtctcctaccccatgtaggcctactctcctgctacagaccaaaaatcacaaaaagtagatgaggcaaagatgtacttgtgcaaccttatttttttccttaaacattcacaagtcacagcactgcctctgagcattaaaccctgaattaagatatcaattaactgagatctaaacactccactgattaaaatagtagtgagacaaggatgaaggatttccaaaatcagcctctaagcatcaaagtggcaccgtgttgaacaaaactcatttaaagggccaggaattccatctctcctggagatggatgtgcagggaatgattctattggagccaggtgggcgggaattcaacaccactgaacccgcaacaactatccctcccacactccatgacccagtgatgcaaaggataaaatcccacaaggggaaggacagaaagaaaagagctggttggaattacatatcctctggggaatcaatcaataagtcctctccaagaaaccaaagccatgaagaaaatgatggtttagctcagctgcgagctgagtgtgcctgaaacctagccagggacgggcagacgtggggcagaggtccacctccacgctggaccagggcctggccacgcctttccttctgtctgatgctcccacatccatctcctgcctcctggcgcgcagtgactcaagttctcactctcccctaggagtcccacttcccatgtggctttcttgctggcgtagggttaaatgcctattcatgaggacacaaagatgagcaatgctactggaatccttttcacagacacaccgagaatttaggtcatcatctacgtatcttttctaatttgggacatgttacccaggatgtagaatcctgggacacgtctacctgtgaaccaaccacagcttcccatctcctgtgcacacagagaggccggggagcagaaatagacatgttacccaccgcctgattaatgcatgcaggacacttttcgttctgtgtaattaacagctctaaaaccggcagatgactcaatttaacacagtctcgcttaaaacccaagaaggcacacggcaattgctgacacgcctgctctcccctgacgcttccagaggtacttaaccgaaacccaaggcactgagctatcaggtggtatgaaagcatctccttttatttcccaccttgccttcagatcaatttaatcatctgcaaaacagtaaagcagaaccacagcctaaattatggaagtaagatgcctgctcttttgaagtttcaacttttgaccttcacattcaaactgcactacccagcacaagaaaagaaattatccagttatgatctcatgtttgtggggaagagtatgattatagaggaatttacaggcaatcaaaaaggcgctccttgagagaatggaaaacaataaaacagtcacaggaaggaaatgaatgacagccgaacaaaaatgagaaagcgagtttgcctgtgctaggagaggctgcttgctgccttccaatcaagacaggctcctgaggaaccctgtgtccccagccaagctgctagcagaagctggggtgcatgtgggtgccaaggaagccaagcatctgccccctggttctccaccctactataccctggccccagcacaagaccattccaagggtgctggaccgtacgttcagtgggaccagcagtgagctgggaggatgactgacactcaggcagccccactccacgggtgccccctcagagctgcaaggagcagtgcaagagcctgggatcaacagtctgggctcaactggcattttcttgggcaagtcactaacttccctgtacctcagtttcttcatctgtagcatggaaataactagaacacttacctaatacaccacaaatatctttaaatacagtgacatgtgttaagtgcttagcacaacaccttgtacacatggagtctcaacaggtgacagtcagtgttatcaagatgtgccaggctgcagcctggctaacatgatgaaaccccatctctactaaaaatgcaaaaagtagccgggcatggtggtgcgcacctgtagtggggaggcgggggctgaggcacaagaatcacgtgaacccgggaggcggaggttgcagtgagccaagatcatgccattgtactccagcctgggtgacagagcaagacttcatctcaaaaaaaaagtgccaggctgggtgcggtggctcacgcctataatcccaacactttgggaggctgaggtaggaggatctcttaaggccaggagttcgaggccagcctgggcaacacaggagaccccatctctacaaaaaacagaaaaattagctggatgtggtggcgtgtacctggagtcacagctacttggaaggctgaggtgggaggatcgcctgagcccaggaggtcaaggctgcagcaagctacgatcatgccactgtactccagcctgagagacaaagtgagatcctgtctcttaaaaaaaaaaaaaaaaagacatgccagtccttcacttatactctcattcaatctttgagcctactttgcaggtgaggaaactgaggctgggtgaatcttcacatccgtaccatgagttaggtttcaccacatctccgttttacagatcaagaagctgaggctcagaaaagtcaagtgacttcctgagcagggaggagatagggctagaattcacatgtgcccgagttgatggtttcctgttatccccataaccctcccacagagagagggtggtgaaggcattcaagacctaagggcaaaagatgagtccctgagtcgtaatctaacatcatggaaagcccacccattcctgttaataaaggacccgcccgctgccccacacagcatccttccttcagtgccccagggagtgtgatgatcatgactacagtggacccaccgagagtgactgggacccaggctattaaaacatacccctgagcagcagggacaatgtgacatttctaaaatggttctactgccatcaactttctgctgcttgctttaataaagttgggaggtatgcttaggaacgcgggctcgacctcaaagcctcgaaaatgtcacttgaattaaagcatgcttctttgaaagtgacgaattaatgacttatcccttaggagatggcaggagtacaggacccagccatggtctccaaggcacccaagctgtaagtgaccacaagggaatgtcccatgtgaggcagtataagtggacatggcccattctaagtacccaggatttattcttctgccaaatgggggctacagataggacaggctctctggtttctcttcagatcctatgaatcatttgccttttacggacaagtcaggcatttgttactttatttttttgagacaaggtctcgctctgtcactcaggctggagtatggtagcataatcatggctcactgcagcctcgacctcctgggctcaagcgatcctcctgcctcagcctcccaagaagctaggactataggagtccaatgccgtgttaggctaattttttaaaattttgtttttgtagagatgggatctctctatgttgctcaggctggtctcaaactcccggcctcaagtgattctctcgtgtttgtctcccaaagtgctgggattacaggcgtgagccaccagcttggctttgttactttataaaaacaagaggtggctgtgaacttgaagaacaccagccctgtcttcacagagtgtggctgtgaggggcgtcggacccactggcctctaaccccgagggtcagtattagcgcctgtcatcggccctcagttctccacccccagctcagccctctctcccactggcacctacctcagactcaacacaccccaagtcccagatctgccccggtatctggccctcccagttgtccccatctcagtgacacaccacctagctatgcgggacaaaaacctggagtcaccttcaactctgcccttcactcacgcatcataaccggtccctcccaggagctttccctcttgactgcggcttcaccactcagatctgtcctgccacagccctccactgccagctggacccctgcaacagcctcctaacttgccacctgttcccacacttgccctacagctgggtctctagtctgaggccaaaatgatttcttattttttattttattttttttgagacagagtcttgctctgtcgcccaggctggagtacagtggcgtgatctcagctcactgcaacctccgcttcccaggttcacaccattctcctgcctcagtctccctaagagctgggactacaggtgcccgccaccatgccctgctaatttttggtatttttagtagagacggggtttcactgtgttagccaggatggtctcgatctcctgacctcatgatccacccacctcggcctcccaaagtgctgggattataggcctgagccacctcacccggctcgaaatgattttttaaatgcaaacccaattctaccattctcctgcttaaacccttcaagggtttcctgtgtttcccattcctctcaagaaaaagtcaaaacggacaccaaggcccacccagccactgcctgtctctccaactgttctcgggctctgctccctggctccgcactggccacacagagccaccaccctttctcttgtttctgtgaacgagtggtccttttgccagggtcactctctcctactccttctttttccacagccgatgcccattcatctttcaggatacctccttggtcccaagctctaagacgaggcgagtcagagctcccagctagacaggaaagaaaatgtgatcatacagacttagggtcatatgtgagaaggctacacatctccttggcaagtgatgatgtggcaaaggcctggccttgcctctcttctacattctcagtacgtgcagccatccatcaaagaaaaaatgccttgctgctgtcaaagagcaatgcgatggcttaggaagaaaactggtggcacactgggatgcgagggccacctccagggcccacagaggtggcgcccagcataagacagctcactttgtaggcagctagtagaagccagttgtgcagcaggtaagggctaacagtatcaccatgggaaggaagaaggtgacagaagaatgcgtagaacagaatgccacctttgtcaagacacatgcgtgacatgtttacctttctggcaatgggattatgtgttatgtttatttctgcccttttcaccatctacctcgtgctggagctatctaagtttggtttacttatggtaggagtttttgtaagattgcaaataagggaaataagtttaactgatgtttaagtgactcacgtcctttcaaaaaaagtacggccagtcaaccaacaacaaagaacaagcaaaacagaaaaggctatgggagaaggttctgggaatctgctttctgaggggctctctgagacggtgtgggcaggaacaacagggcattccatccccatgagccgagcacaacaaacaggcaaggtgaccacaggccgtactcaccactcaacgatctctgggtgaagaatggtattgttgacttcgaacctgtagggcgaaaagaaatcaagcccattaatccaacggtctgtcatgtcccagcaagaactacctcattcaagacatgcacacgtgatgcattaaagagggtcccacactttaatttcatgacttcctgacccacaaaaggcctgttgatcccttccttcagcagacctggcagcctgggccatgtcctccaaatgcagtcagttggagagcaagctttatggctacaaaacaccagccctgatccccactaggcagacagcatagtctcttgtgtcaagtatatcaaaatacacacaataggagtaccagaaggaaagaatgcagagaaagcaaaaacctcaccaatttgatgaaaaacattaatctacatatccataaagctccatgaactccaagtaggataaattcaaagatatccacacctagacacatgataatcaaactgtcaaaaaagtatcttgaaagcagcaagagaaaagtattaataattcatcacttacaagggatcctcaattagattattagctgatttctcatcaaaacctatggtggagagaaggcagtgggatgacatttaaagtgctgaaagattaaaaaaaaaagtccaccaagaattccatatccagcaaagccattattaataaatgagggagaactacaacatcccagataagcaaaacccaagagaatttattactagcagacctaccctgaaagaaaaaccaaagggaattgtttcaaataaaatgaaaaggtactgcagagtaacctgaatccacgtgaagagaaagagagcactggcaatggtaaccatacagataaatataaagacagtataaatgtattttttgtttgtaactccttttctctcctgacttaaaagacaactgaataaagcgataattgtaaatctgtattgataagtacaaaatgaataaagacgcaatccacatgccataacagcacaaaagagaatgaggaaaaggagacatataggggcaagcttttgcatgctatttaaattaagctgacattaatgcaaactagattttcaagtttaagtagtcaattgtaatccccataatcattaagaaaacagctaaaacatacagaaaaggaaatgagaaaccaaaatgtgacaataaaaaaaaaatcaaacacaaaaaaatgtaatggagaaagtgaggaacaaaaatgttataagacatatagaaaactaattttaaaatggtagagtttttccttatcaataattactttagatgtaaatggattaaattctccaattacaaggcaaggattggcgaatgaattctttttttttttttaattttaagttcaggggtacatgtgcaggtttcttacataggtaaacttgtgtaatggggctttgttgtacagattattctgccacctaggtattaagtctagtgcccattagttattttgctatttttcctgatcctcttcctcctcccaccctccaccttccaataggccccagtgtgtgttgtcgccctctatgtgtccatgtgttctcatcatttagctcccacttgtaagtgagaacatgtggcatttggttttctgttcctgcattagtttgctgaggataacagcctccagctccatccatgttcttgcaaaggacatgatctcattcttttttatggttgcatagtattccatggtgcataccataccacattttctttatccagtctaccactgatgggcatttaggttgattccatgtgtttgctattgtgaatagtgctgcagcgaacatacacatgcatgtgttgttagaacaatttatattcctttgggtgtatactcagtaacgggattgctgggttgaatggtatttctgtttttaggtctttgcggaattgccacgctgtcttccacaatggtttaactaatttacactcccaccaccagtgtgtaagtgttcctttttctctgcaaccttgccagcatctgttactttttgactttttaataaaagccagacagaatgattttttaaaatatgatccaattatatgctctaaagagacacactttagattcaaagacacaaataggttgaaagtaaaatgatgagaaacgatatgctacacaaacagaaacgaaagtggaactagaatggctatactaacatcagacaaaataagccctaagatacaaagttttactaaagacaaagaagggcattttataacgataattaggtcaatccacaaagaagataaaacaattacaaatatatgcacataacagagccctaagatgtatgtatcaaaaactaacaaaattggagagagaaactgacaatagttggagacgtcaataatctactttcggtaatgaataaaacaattagacagaagattaaaaaggaaacagaagacctgaacaaaaacgcggtggctcacgcctgtaatcgcagcactttgggaggccaaggcgggtggatcacgaggtcaggagatccagaccatcctggccaatatggtgaaaacccgtctctactgaaaacacaaaaattagcagagcatggtggtgagcgcctgtaatcccagctactcaggaggctgaggcaagagaatcgcttgaaccgaggaggcggagattgcagtgagccaagatcgcaccactgcactccagcctggcgacacagcaagactccgtttcaaaaaatatatatatatagcgtgtgtgtgtgtgtgtgtgtgtgtgtgtatatcaaaaacctaacacgtagctctaaaatactcagccaatagcagcagaacagccattttctcaagtgcacatggatcattctccaggatacactttatgttaggtcacaaaacaagttccaatacatttcaaaagactgaaatcacactaagcatgccctctgaccacaatggaatgaaataagaaatcagtaacataaggaaaatagaaaaattgacaaatatgtagaaattaaacagtagactcctaaataaccaatggatcacgtatcaaaccttacaaaggaatgaaaaagggggaaattactactgactttacagaaataaaaaagtttataagggaatattataaataacatacagtaacaaattggataacctatttgaaacaaatccctaaagacacaaactattaaattgatataagaaatagaaaatctaggctgggcgcagtggctcatgcctgcagtcccagcactttgggaggctaaggcgggcagatcacctgaggtcaggagttcgagaccagcctggccaacattgcaaaaccccatctctacgaaaatacaaaaattagccgggcgtggtggcttgtgcctgtagtcccagctactcaggaggctgaggcaggagaattgcttgaacccaggaggctgagcatgcagtgagccgagatcgtgccattgcactccagcctgggtgacaagagtgaaactccatctcaaaaacaaaaaaaagaaagaaatagaaaatctaaacagaccttaacaagagatcaaatttgtaataaaaaacttctcataaagaaaagcccaggaccaaatgtcttctatgaaatgaatagaaattctatcaaatgtttaaagaattaacaccaatcttcataaactcttaccagaaaagggccaggtgcagtggctcatgcctgtaatcccagcactctgggaggcagaggtgggagaatggcttgaggtcaggagttcaagaccaacatggcaaaaccccatctctactaaaaataaaaaaaattagcccagcgtgatggtgcacacgtgtaatcccagctacttaggaggctgaggcaggagaatcacatggacccaggaggcggaggtgcagtgagctgagatcacaccactgcactccagcctgggagatagagagactccatctcaaaacaaacaaataaacaacaacaacaacaacaaaaacagaaaaggaggcaatacttttcaaccactctacaaggtcagtattaccttgatgctaagctagacaaagacaccttaagaaaacaaaattacacacccaaattccttgcgaatagagacaaaaatttttcaacaaaacactagcaaacagaatccagcaacatataaaaaggatatatatacatcatgaccaagtgggattttttcccaggaatacaagattccttcaacatacaaaaagaaatcaatgtaacacatcaatcatattaatagaacacataataaaaccatatgcttgtataaatagatggagaaaaataaactgataaaatcaaacaccttttcataataaatactcaatgaactagggagggaagggaacttcttcaacttgataaagagcatctacaaaaaactccctcaactaacatcatagcatactgaatggtaaaagactaaaagctttcccctaagatgaggaacaatgcaagcatgtctgctgtctccaattctattcaactctgtactggaggttctagccaaggcaaacaggcaagaaaagacatgaaaggcatccagacgaccctgcaattccacttctaggtatatacccaagggaactgaaagcatatgttcacacaagaagtctgacatctatgctcatagcagcattactcagaacagccaaaagttggaagcaacccaggtgtccaccaactgatgaatggacaaacgaaatgtggtacgtatccatagaaaaaaatatttttcagccataaaacaaagtagtagtgacagaataagcaagcagggaaatcaggaaagatatagaagatataaacaagaaattaaccaacttgacgtaattgacatatacagaacactatggcccataactgcagaatacatgctttctttaagtgtatgtgaacatttatcataatggtcacgtgctggaagtttcaacatattttaaagggctgagatgcagagaacattcattaatcacagtagaattaaatgagaaatcaaaaaatatccatggctcaaagataaaaatacaatgaaattagaaaataacaatatgaaatatcataacctgtgagaaatgcagctaaagcagtgcttacaggaaaactcatagctctaaacatacacagcagaaaagaacactgaaaatcagcgatctaaacttccatcctaagaatgacccttgaagaaagcaatgaaataaaaaggaaccatataagaaaaatctacaaagccaaaagctgctcttcgataagatgaacatcattgaaaaggtgaccccaggagacaaaaggatcaggtcagagcacatctctgacacaagagaaccctgtgtgacacagagctcaagctggagaacaaggtagcctagcacaagctataggcctcagcagagaagcctcggcaagacttcaactctctggattccaagacctgctccttagccaggtgtggtggctcacacctgtaatcccaacagtttgggaggccaaggcagaaagatcacttgagcccaggagttcaagaccagcctgggcaatgtggcgagactttgtctctacaaaaaatttaaaaattatctgggtgtgttggcgcacacctatagtcccaactattcagaaggctaaggtgggaagatcgcttgagcccaggaggttgaggctatagtgattcatgattgcaccactgtactccagcagcctgggcaagagtgactcttgcccagtctctttaaaaaagcctgtctctttaaaaaagaaaaaaagacctgccccatcttagggaaggatagcacacacaagcacacgcagggtcgtgacctcctgtcctcctgccagccagggaccctccatggcttcgttaatggtgttgaaaacacctatgtaatgccatggttgtgaggccagcagcccttctagctgagccaactgaacaggggcagggacaggggagagaagagagaagggggtaacagcagactgagaggattccagatgtctgaagctttcaggatccttaactatacaaacagaactatatgattcaaagtcaacctaaatgttgtggaatcaaagccttacttatgaaatatcaaagagactacgggcagccagtgtggttcaaagtgaagaacagggcagcaggtgacataaatcaaaactacaaaatagactctggctcccactgcaccaaatgccactttgaccctaggaaaagcagtggccaatctactcagcagccaaacacaccaccaccatttcatcttactcaacgtacgtacgcatacacacgtgcacatgcacacaagcagcaaagtgacccagcacagagtgactcagcacatagacacagatgcacacacgcagacacacagagacaggcatacgcttggaaaagaggcacacacggacacatacagccatgtgcacaacaggggcatgctcggacacacatagatagaccccactgtatatgcacacacacagatgtaggcaggcatgaacaggaacacatacacacaaacacacactaaggcacaagcttaggggaatgtagacacacatatacacacacatactcagacaggcaaatacttaagacacacaaaaagatccacaccctgatatacacacatacaggtaaacacagacacagatcaatgtgtatacacagatagacacacacacacacactcagacacaaaaatatactcagagaaacacaatcagacacacacggaagaatccaaaagacaaggttaacaggttgaaccctgggtaataaaattcatatagttctcatttttgcctccatgctggttagcattttctacaatgagcatgtattaatcgtgtaaaagtatcaacgaaatcccactgggcctgtgagggtaggcgtgccctggaagcagagtgtaatttcctgatgagctctaaatgtgggctgggagatgagagggccaaagcccctgtcccaggccactggcttctttccgggcatatctcacccaaagatgaggcagcccctccactctgctccctgccaaagggttgggtcaggttctcacctcttgagggtccctcccctcaccgagaactccatgggtcacaattagaaagccaatcctggctgggcgcgctgactcacacctgtaatcccagcactttgggaggccgaggcaggtgaatcacctaaggtcaggagctcgagaccagcctggccaacatggtgaacgctgtctctactaaaaatacaaaaattagccacgtgtggtggtgcgcacctgtaatcccagctacctgggaggctgaggcggaagaatcattgcaatctgggaggtggaggttgcaatgagctgagatcgtgccactgcactccagcctgggcaacagagcaagactctgtctaaaaaaaaaaaaaaaaaagaagccaatcctaaatattaacttgatatccaagttaacagtaaccagaaaaccacggtcctcaaaccacagattggtattttgctgtaatcgtcaagttttaataatgtccctctacttcctgggttttaaaattcacatcttcggatattaatattcctgcattaacaacccccaaattcagaatttcatctttaactgcttgcttaaatggaatcaattcgttaccaattgtcttcaaatatgcagggtgatctaagtaaatgccgaaagataagaaatacacttagcctgaataagtgtatttcttacactgatgtaagaaatgtaaaatactgaccatatacaatggcaggaaacggagcccctgtcactcgctgccccggcccagggctcctgggtacagcttctgtctgtctgggaggcgactgccttgtgccaagaaggcaccctcgttaaggcatggaaacttgatggacaggcatccctcagctcaggccacccagcccctgccaacaatcccccaacagaccatctctccttcatggtcagtctcctgctctcaggaaaacctgccctaacgtctacctccttagatgttttcagagatctaccatgtctgactttgctcccagccttcaggagccaagtgttccagggagcctatcttgccatccgcaggaagaagtctcaagtctcttgctgcagggttcccctccccatctcagcccccactagcccccaaaccaaccccccatcatgcccccgccaggacctggcaatgagcacccgaccccatgcccacacccacccctcctgccagagcccgcagcaaagcctgctcttcccaaatcttccttgggactgctccaatcaagccacacacggaactgctgcctgggccggaccccaaactcacaagcccctacagaccatcccggcctacacccttcacgctactgtcatcacaccgagccacatcactgggtgagcccaggggcctcagtccacagggtctctctggccgtgtgcatgcccaccaccctcagcccacctctgccctgtcccctctgctccttgtcctctgctgtccccacacctcgagaccccacacactcttactgcaggcagcaggcggcctggccctgatctggggaggtggagggaggtctgagaccaaggctgagcccaaatgggacagaccccaggccaggcaccccgagtagccacacctggaggggtcctggcccaaccatccagctggaccagggtcccaagggtataggctgggtggacaggtggggaccactgtctaccacaagctcctcttccctgcaggccaggggataaggggagctgggggggcccatcaggtcaaaccaagaggccaaacctgaacttctgttagaggaggaggtcaatcgaagcccaaggtgcaaggtgctgcagagacatttaaaagggtcaaaaaggacaatgccgggaacaagcagcttcatcagagcagtgagaggcaactggggcggaagcagctgcgtattggagaggaggacgacagcaagattcatcttgcttgggaaacaggctattaatatcccagctagcagctggaggtgcacccggcaggcaggggaatgcggttgctgagcggcagcggctcttggggacgtggtctctgcccagcccggcacaaaagtgctggcagcctgggtgagtggaaggcagggggatgagctgcacctggaccccaggaatgcagacaagactgtccacagggaagcggctgggagcagctggaggcaaaggctggggccccatgtcaaggcccacggcatgcagggtagggggcaccagccagagctcctgcctcagtgaaacagccctggtggcagtgaggtggaaggccccgaggggagagacatgggtggatggccccctgcaggggacaaggaagggagggaggagaacaagcaggccagagatggccacgagggttctcacccgctgcgcattgcaacagccaagtcagagactcggccagcagcccaaggcgtaggtgcggaaactgacgcaccagcacccggggtggggggcagtgtctcagcccagcccccagctgaggggccgggtgagcaccccccagtcagccccagcctggcctggatcagagattggagaggtaccagcccggtgcctggggagatggtgcaaaagtaaggcagtccctggctctccaaaaagtgtcccagtggtgacagggtggggtggggagtttgcagagcacaggctcctctgggctcttggcagaggccacagggactggggggcaacaggtgacagagactgggatgagaggtcacacctaggaatcctcctggggggtagaacgagacctttgcttcctgacactcactgacagtgatgagggccctggggaagcccagggccccacctgccttcctcggggaacctcaaggagcagctggcagagctctgcttcagaggccacatcttgagctcctggctgggaaccacacccaccacacagctgccagacgtggtccaggggggctcagcattctctctagaggaggagcaagcaaagctctcaccgctgagaaggccctcgactcactgacatctgggaaactgggaattggtgatcctggagcccacctggcccaccacgcagatggggagactgaggcacagaggagcaatgggatttgctggggtttgcatgcgggcaactgtcactgagcaccagctctgtgccaggctccaggtgagcatgatctcctccagtgcccaccacaagcccaggcagcaccaggttacacgtggaggagctgagggtccccctgctgcagagacccaaacagaggccatagagaggttccatggcatggtcgaggaaaggtgtgcaggacactggagacccagcaccaggtagtgctggggggattcagggagtcccgggactgggacaggcagcagctggctgtgcccgtagcccctctgagggcctgggggcctggggagagagagcagctccatggccagcatttcaacaagctgggctaattgctgccaggcgtgggaggcggggccgctttggggaaactcccaggaggacacgaagatctgtgcagtgaaaaagcaaacctactacccgcccctccacccgccccactgctcttagcatagggggaggtgggaggtgatacatattcatgagctcataatccctcatcacccctacatcacacacagagattccagcagcttgggctcatacataattataaggcggttcctccatcactgccttggtccaccagaggacaacagaagacatgggggctgtaggggatgcatgataggggaggggctggggatccaggtcccaaagttggggctgggagctgcccactgtccacgtgcagcagcctcgagcgcaggggccttgtctgctatggcatcagccagcaatgcaggccacagacccccagggccagtcaccagccagtccagggacccaagcacatccagtgggcagggctctcccgccctctccaggctctcccgggggctgtgggtgaggggtgacaagcaggggaggggcgtctttccctgtgcccaaggtctgtcctcctgcctggagagaaaaggggaaccgcttcccaagcagggtttggaggctcagcctggcgcttggttaagagtgagaagaggttaaagggatcctgcctgggattaggacagcaggggacacaggggagctgctgagagccgggttggaaggggttaatggctgggactaagagagggggcttgggacaggcacggtgtctcacatctgtaatcccagcagtgtgggaagctgaggtgggtggatgacctgaggtcacgagttcgagacaagcctggccaacatggcaaaaccccatctctactgaaaatacaaaaattagccgggtgtagtggcgggtgcctgtaatcccagctactcaggaggctgaggcaggagaatcacttgaatccgggagatggaggttgcagtgagccaagatcgggccattgcactccagcctgggtgacagagcaagactccatctcaaaaaaaataaaaaaataaaagaaagggggtggtggcttgatgcacagaccacaggggctcacagcagatgtttagagggaaaacaacccacctgtgcctgcccctgcccttgcccctgcccctgccctggccagggctgcctgagcactttccttatggagcaaacagacacggggcacctttccttcaagaaaaatcaaggtgatttttggcaaattatgcttctaaacatttcctcaaaatgcccaaactccttaaaaagaagtttgcatagttcatgtcttatttgtagaccgggaaagacctgctagtgaaggtgggagtgggggatggtggggaaagagtccctgggggcccaggactcacttgctgatgccgtcaaaggaggcctccctgcagacactgccgctgtccgtgttgacgccacgctggggagagagaacacagacatgacacacggggccgcatggcgcccccacagcctgcacccctgaggcctccagctaggctcaggacaggtaagaacaggatcccctcctgccttcccccaacagatgagccacccagccaggtagctccaggcccggccccaacacaaggacagacctctttgctaccacttgccaagtggaggaagtgggggccccccaaactctgcagcatcccagctgcacagcaaggccttctccatggaggtcagagcactctgctgaaaccagccaggctgcccaggcacaggcgaggacccgggaccactcccaatataaatctgctctccccagcctggtccatcttccctctcctgcacacactccccactaactgtataacatccgaaagagtcctgtcgaacccagcccttctggggaggtgtgcaggacctgactgtggcaggactgctgtgaagcagggagacatccctctcttaactccaaggagactccaaatgggacttggacaggaatggagacaaaacaagggacttggagaaaaatgggccctctccagaaaggcaaggcattttatttcatttattttacttatttttttttgagacagtgtcttgctctgtcacccaggctggagtgtggtggcaccatctcggctcacctcagcctccacctcccaagttcaagtgattctcctgcttcagcctctcgagtagctgggattacaggtgcgcaccaccatgcccagctaattttatatttttagtagagacatggttttgccacgttggccaggcttgtctcgaactcttgacctcaagtgatccgcgtacctcggccttccaaagtgctgggattacaggcatgagccactatgcccagcctgggcaaggcattttaaatcaccatttctttacccagaacttcagcttgatgtctaattgtatatctaaattgaacacattggatcatctatgaccataatcatctcacataagtttcccttatagccatcaagacagtaaagcaaaaaaaaggggccaagtgctaaaggaaataactattttggtaaaaatcaattaagaaaagagaaaggctgggcacggtggctcacgcctgtaatcccagcactttgggaggccgaggtgggcagatcacctgaggttgggagtttgagactgatcaacatggcgaaaccccgtctctaacaaaaaacacaatattagctgggtgtggtggtgcatgcctgtaatcccagctactcaggaggctgaggcaggagaattgcttgaacccgggaggtggaggctgcggtgagccaagatcgctccactgcactctagccgggcaacaagagcaaaactccatgtttgaaatgtttgttcttcagtgccataaagaaatagcacttgaacataaatttaatttatttagtaaggccattttcacttcctgcagaaagggtacactctccagcagttttgccacgagagttcaccaaacaaaggagacagggtcgtttataacctggcgtgtccaccctactgctgtgtccggtttccactgcctggaacgggaccccacattctgtatttgtcccgattggctagcaacttagaactttttaaaagaggcaaaggtagagggggagaaaggaaggaggaagtaacttgtggaatgctgagaaaggtaaaaacacttttaaataaggaagaggaacaggctatgaccttatgtttgcttggaccagtataagcacatcagggcaaatatttaggttaaattgtgggagctaaaaacataaagtatattgatttctttattacagctagcagatatttaagaatgttagcacaggtctttgaataaattttgcttctaagagaagttactgtttatttctaattagacggggaggaaagtctttgaagagaaacctctactttactttttatattccatttcaaaaaaaaaaaaaaaaaaagacaagagggaagggtcactttggggggaaggcttgtggacatgcctcttatatgaaactcccaagctcaaagaagtgtaagaaagcacacttctctgagaaattccagagaattctttgggggcacaccacagctcaagtgcccccaaaaccctgccggcgtacccagagcccacctcgcaccccccaccctagcccaggccctcggtcagtcactgcgccccacacccctgctaccttgagggcagacgcccggtggtgtggttttcagacccctttaacaggggagacagagggtgggaataaactttcttttttcctttttaaattttttatttttagttttcatgggtagatattaggtgtatacatttatggggtacctgaaatattctgatacaggtatgcaatgtggaataatcacatcaggatacatgagctatccatcacctcaagcatttatcctttctgttacaatccaattgcactcttctggttatttttaaatgtacaataaattattgttgactgtagtcaccctgttgtgctatcaaataccagatctgatttgttctacctagctatattttggtacccattaaactgactttctacatccacaaattccaggagctcagcctgacacaaatacatcttctagccaggtttaaccttaggagtgggtgtggcgccaggcccacatcctcacgacaggacacagcaggtcccagggagactcaaggatggggtcccataaacagctattcagactgagcaggtatcgctacttatcactgatgaccattcctcttggtttatttttttctttttttgagacagggtcctgtctgtggcccagactggagcacagtggcgcgatcatacctcactgcagcctcaaactcctgggctcaagcacgcctcccacctcagcctcccaagtagctgggaccacaagcacatgccaccaggcctggctaactttttaatttgttgtaaagacagggtcttgccatgttgcccaggctggcctggaactcctggctccaagcgatcctcccaccttgcctctcaaggcacttggataacaggcgtgagcccctggacccaacccctctccgttttttaatcctcccctatgggcccgacctctgcaggagaggtggcccccataaaaaccctccccagagccaagcactgccccacccctggacaccagccacttaccaaagtgaggaggacagagggcttctgtgacgtcaggacgctggcaatctagaaggtcggaaagaaaaacccactttagaggcaccactaagcctaatgaagatgacatgccaccattccttcataatgacagtgcacatttatcaagcagatcattagaacaggcgacgtgggcgctgccctcaccctgcaggtgaagaaacccagcttcccctggttgaaggacttctgaaagccacacagccatcgaggggcagagaggataaacctacacctggctcgcttcccaccgcaccgccctgcttccaggcaccacacagatccctggctccaagcagccagccctacccaccctccaaggccagcccctctgcccatctgcaaagtccctgctcaaagacccgtcccccgggaaccctttaggctccaggcctaccagcctctggttcctagggcagaagactccctccctgctccccattcaacccctagacccaagggagttggccttccccaatcccaccctctggcccccaccccacagcccactctctgtccctccaccatgacccacttggacctcctgccactgcaagccagttacttcccggcccaagcccttgcatctgcatgccgggccagctcctctctccacgcctctgctccagctcttatctctccctgagtgccttcttcccatcttagtgcctcatcaatgtgcactcaggatgaaagccccagccccctgggcaggttcgttcactccctcctctactgccccactgacagtcaccattcccccagcaaagtgccatgtgccaaccagcctgctgggagcaatttcttcctctgccagcccctcctcctcagtctggcctgcatcttggctactgcagaccctcttgtttctgagcaccccctgggcagagaacagtctcatctccacagccctcgcctctccccacacccctatcctaactctttacacccgaaacgcagggggagagtgaggagaacttgttgttgttttaacagcttgattgagtgatcactgacatactctatgctgcctgtatttaacatagacattttgataagttttgacatatgtatacatataccttttttaatactgagatgcctcccaagaaaacctggaacgtattgaaaactataaaaagataaaatgcacgtacaatcctatctccagagacattttagctttgctcataaaaacagagatctgtaatgacatttggatcatatgaaattacatgcttcacttatttcctgtcattatatgttcttcaaacatgcaatttttagcagtcactaccgctggggacagtaaacgtccagtaggtcgctgaagacggcctgtgccagtcatcttacacacagcatctcatttaaccacacggggagacagtgcggcaaacatgcaggtttcgcaaatgagaatggcttacagattagagaacttgcctgagtctggttaaaaaataacagcgcagcccagatttgaacctatggctgtagaatactctcttaatggacactactcattcctctacggacacttaaattacatctaatacactttgggaggacagggcaggcagatcacgaggtcaggagatcgagaccatcctggctaaaacagtgaaaccccatctctattaaaaatacaaaaaaaattagctggatgtggtggcgggtgcctgtagtcccagctactcaggaggctgaggcaggagaatggcatgaacccaggaggcggagcttgcagtgagccaagactgcgccactgcactccagcctgggcaacagagcaagactccgtctcaaaaaaaaaattacatctaataattagcaattataaataacgctgtgatgaacatcctcgcatacaagtatttccttaaaattaaatgccagccagccacagtggatcatgcttgtaatcgcagcacttttggaagctgaggcaggtggatcgcgaggtcaggagttcgagaccagcctggccaaatggtgaaacccccatctctactaaaaattagccgggtgtggtggcacgtgcctgtagtcccagctactcaggaggctgaggcagaagaatcgcttgaacccaggaggcggcagctgcagtgagccgagatcatgccattgcactccagcctgttgggtgacagagcgagactctgtctcaaaaaaaaaaaaaaaaattaaatgcctttaaaactgttgggtcaaaagccacagactttgtcaaggtttaccatgctcctggcccaatgatcctccagacatgtatcaacaatctcccgggatcctccctcatgttactgagtgactgcttggagaatggctgtgtcctttggcctcagtgttgcaaaaaaacaaaaggctcagctgggtgtggtggctcatgcctgtaatcccagcactttgggaaggctgaggcgggtggatcacttgaggtcaggagttcaagaccagcctggccaacatgatgaaaccccgtctctattaaaaatacaaaaaaattagccgggcttggtgactgtaatcccagctactcgggaggctgaggtaggagaaccgcttgaacctgggaggcagaggtttcagtgagtcgtgactgcgccactgcaccccagcctggggggcaagaatgcaactcagtatcaaaaacaaaaaacaaaaaaaaacacccaaaaggttcagctgtgtccctacacaccctcagcccctcctgaaggaaggggagacttattaaaaggaacaggggtacacatgccggccctaggtgtgttgttacgttgatgtgaatgttctgcattcagctgcacagaaggagcccgtcaattacagcagctgaatcagaaagccaggaggcacttggggattgtatctgctatcgtcttgggagggaggagcaggataacaaatgtgtgggctgatggtttttctccgggcgacgactctcaggacatgctggttaggaataatggaggaggggagagcagccgtctccttgcagcccggtgctcagacaatccaggcctgactctgagagcaggctgtgcatctcctagtcctggcagggcaacatcttttattgatcacaactgcttgagtgggccctggttacttctgcggctgcaaaaacctctcccgacctggcagctccacccgcccttccccatggagacccattagtgctacgctctcatcagcacaccctgactccgtgcctcaaatattaagggaacacgacgcgctgtgcgttgctggctcccgatgtatccccagcacacaagacagcacggctctgtcaactcagggcctcgtttccacggagtggtggccactggggacctctcacaccctgcgctgttaaatgaccctgccttgcttcatgccagagccagcatcgatttctccggcagcccccggcctctctggcagatggagctggatggtcacgggcagaattcatcagagccctgtgggtgtacatcctcccctggggacaatcagaggcttcccacggacacctcctgcactttcctaaccagggcccagaccaggcccgagggccgcttttcgcagggtgataagctggacaaaaaagctggatatgcctttgccagcgctgggaaagcctgcaaggctccagagagctggctctgccctgcaatcactgaagcttttgaaaataaaccttctttcgtggcattctcctccaacagtattgcacgctggtggcctgcactgcttttacaatttcaaatttgtttctcaaatgtaaacatcaggaaacatcaccaacagtctggatgtgtggctactcctgaacaatcaggttcctggagccatgggctcgtggtcccacagcacagtggcccctgctgaccccatcgcttccgatgcctgtccctgtgctgctgcggttgtcctcttacatctgtcctgcctgtagcagacttggtgaccctcggaccttctcacatatgcctggcgccataaagggaagcaagtgcatggaacgcacgcttcacctgccagctctcagccggtgatcccgccagcctttgcacagggccttcacggcagagcctcggggccccactcaaggttctgctgaatgcctccttctcaggggaactgccttctcaataaactcaggatcctctgtggggaggagggaacctcggagccagctgtgccccatcagacacctgcatggcatacatgctatcacgtgaccagccatggcactggaggccttcctgccttttttcagaggagacaagcgttggctgtgatttgtcactgacagctaaggccaccccaagtgagatggggctgagcactgcagaaccagcctggggaccccttccctgcataaagggcttcctgtaacctcccatgatgcaacaggccctgggtacctcaagcaacctgggatacctcccagctcagggggttcagtccagcaagtcacactttttggcaggctcccttcagagccacagaaaatcaaaggcacagggagtccatgtcgcctccacaggagtgtcctacagcagccctcctttctgaggggaaagggaggcctggaggggaggcccctggcgtcacatcccagtaccactcccctccagctgtgggactgtggacgaggcctttctctctgagcctcagcctcatatctatgaacggggtgggggctacggcccagcacagtccctgccccgctgtgtccctcccgcagcgggagggccaaggggctccaagagagctctagtgttactggagcccacgtgggccgccccagcatgaagcgcttgctctgctgtcaacgtgagccttgttcccagtaaaaacagcagcagtaacagtaacatcaacaccaatctgcaatggcagtggcgttgacggggtgcggtggggtgctcccgaaccctaaagagattctagcctttgaactctactgaagcctcgacaatctgctttgtatacgaagacgaagaatgagccggtctctgtgctgtcattctgtgcaaccattaacaacttccctgccctaacactcaaggtggcctgtctcttactttgcttagagaccagttctccttcctcacccccagaaatcacagtagacacggagctgaattttcccccagttataaagacaaaaatgtcagacagtggctggggaggctgtggtccagaggtggctcggactcagcagctgagtccagggcagaggcaggtgccggtcccaccacggtccttgagacagggtcctggaggcaggtgcccatcctgccagggtccttgagacagagtcctggaggcaggtgcccattccaccaggatccttgagacagggtcctggagacaggtgcccatcccgccacagtccttgagacagggtcctggaggcaggtgcccatcccaccagggtcctcgagacagggtcctggaggcaggtgcccatgccgccagagtccttgagacaggatcctggagtcaggtgcccgttccaccaggatccctgagacagggtcctggaggcaggtgcccatcccgccagggtccttgagacagggcccaccccaggctgcccctccaggtttcacatcgaagagacctgaagggtcaaggtttcaaaggacaacagtgttaagaaacagtttctggggcagggaacacatctgccaaggagagggtcggaaggaaaacgagaatgaaggagtaggtgcctcctgctccacttctgagacatacaaggcaagtggcagatggtctcattgggagcatgcaaataaacgttccgtctattttagatcctgtactcaacgggatcaatatgataggtcacatgtgtattgacagaatcttcagatgttaagagtcacccccaaaagcttgggattgaaataacataacataaagatccatcaaaagcctcctctctccacagtccaaccaggcagaagatgctgtagagacaggcccccgtggccctgtagaggtgggcagtgcccttcacagaggctcttccagggatctctgcccaggcaccaccaccctgcggtgactgttcactcatgtggtcacctcctgcactggactgtgccctgggctgttgaggtcagccctgggtctcggccacctctgatgccctacatgtccctgggactgggcagggaaagagtgcaagaggaacgtctggggaaaaagaactggacgttcaagacaaatacaagacagtcaagggcagggtgcacatcagaacacagtcagcgtccatggtgtccacaacttggtcctgagggctcagggaaggggcaccagtgtgggccagagtctacagcagatacagtggctgctacaaggctggtgcaaggcctcaaaagatggataggagaaagacagagaaatggaaaacatattccaggacagcagtaccgggggcagggctgggcacatggtactggcccacctgcagtcaaagagggctggccacccccgagctggatgggccgggctgggcccccacatgctgggcagagacaactggtctctcacagcactgtgtctggccatgatccctgggaacctgcttctcacccagtgccgtcatcttcaaccaggctgtgtcctgcccaggggaagggggaagctgcttggccgccagaactggctcccctggccacttccacactgcagccccggctcttagcatggccgacacataatctctgtctggggaaatgtggctacaggatggccctgtccaaagctgatgctgccaggtccaggttggactcccagtggcaggcattgacttctgggtgcttcacattctacacggcactgacctgcacaggacgtggggttgtgacagcgcccagggccagagcacagaggcctcctgtgtgccaggcagtggtttagtgtcagggcctttggtcaagtagaccacaggggctcccagctgtgctctcgcctctgtcccagccctgccccactggcaggaaggagagctggagtcgaggagtcagggcagcccctttgacctgcctgaacttggttggcacagattcaaaaccccaagaggacagccacatgcctacccaggccacacgacacctgctggacaaccccactgagaagtggattgaagtcaggggacctccaatgctactctacaagcctttcacagcctcgggcttttctgacagtggcatctgcagtcaaccagggctcgagacacacgaagaccccggcccagccttgtggtgacttagaccgtgtgccaccgctgcaggcaggcccgcctctcagagacacctcatgtaatctcagcggccacaacccaggtcaccagacacttctacccacagagtcaggggccttcccaggcaaagcaatggctccgtagagaagcctgaggcatgggttgctgcctactccttccaaatgggagcacctgcggcgcagggactggtggccaggtggtagtgtccctgacatccagcaaggttgtggcagtggaaggagaggaactccaggagtggaaggcatgctggaagccctgggctgctcagaggaggagccggctacccacctcatctacgtactggacgtcgtccacggcatacttctccttgaagtgctccttggaatggatcctcaaagaaaagcacaaggaatatcagggtcagggcttggtaatggctcagcatggccaccttcctgcctgccaagcccaggccatggagccccagtcccatccctatcacggtcagcacccagcacccagcacccggcaccgaacaggtcggcccaacacacacttggagggcaaaggccattaggccatggagtgacggctgaaccacagctgctttcctcagcaagccccgctcctccgtgaccctagccacctgcagccagcccctgcagacaaaacccctatcatcccctccactgccagagacagtccaccagggcagccagccagtgcacccgtccctctgtggcataaaacaatctgcctgccaggtcttcatggagcatctttaaaggaaagtttattttaaggtcagccgcagaatcccagcactttgggaggccaaggcagacagatcacaaggtcaggagatccagaccatcctggctaacacggtgaaaccccatctctactaaaaatacaaaaaattagggcgcggtggcgggtgcctgtactcccacctactcgggaggctgaggcaggagagtcacttgaacccaggaggcggaggttgcagggagtcaagatggtgccactgcactccagcctgagtgacagagcgagactccatctcaaataataataattattattattactattttattttatgttctagagacagcatctcgttctgtcacccaggctggagtgctgtggcacaatcatagctcactgcagcctcaaactcctggtctcaagcaatcttcctgcctcagcctcccgaagtgctgggattataggcattaggcactgtgcccagccaaaaattagcatttttagaaagtcagtatcagtattactcaatgtgatgagaaaaactcaagcttattcattacccctgaaaaatctgccagtgagaagacacagaatggatgaggttgggcagccctcgtccacctcctgatgggccctttggtcacagctgtgctaggcagacctccagcctgggtccagcaagccaccacccccaggctcttggtcaggagataagtcaatgtctctgttagtgacagagcttacgcaaggggaaaggaacacaaactgcacaggggagacactgagagccaagtccaatgacgcacacatactcggtcctatgtcatcccacacctgggccccacctcatcacacgggctctatccccagccgtgctccagccctccagctgtctgtgacctcacagtgttacagtcaccaggtgctgggtcccaaataggcctcagacaaaaaaacagcagatggtttctggatggtgtttcctgggctgtcaaggggtggtggtgaggcaggagaatagggtcgggaggcgttagggctttttcatgctgacttcctagaactaaattgaaaggaaaaccctaactttccacacctaagtaacaaaggaccagaggctgctccctttgcaaacccccccttttttttgaggcagatgggaaattgaaagtacctctgattgcaagtagagtcttggtttgcaaagaaacgcaactttgtaacttcactttagcctctgattggttgcagaagtgaagttacaaaggttgctttccacaaccaatcagactgatggcaggccaccacttcatttacaccaggcgagcaccaagtggccaatgggaaacctcctgggggtatctggacctgagaagattctgtcactaggccttgagactctgctcagccggctcccacactgtggagtgcactttcattttcaataaatctctgctttcattctttcgttgcttcattctttcctttgtgtgttttgtccaattctttgttcaaaatggcaacaacctggacaacttgcagtcaagaccctctacggataactggggggcgggggggggtgttgtgggtgccaaggataatgtgcctggagaaccccacggaacacggtggagggagagaaccttgggacttggaggtgatgaacttcacgagtgagctcctgaactggtgtcctatgtgccattctcagcctttgtgacactaaggaccagcatcacctgcaggaaacagaatctgctcctctctctgagtcctccaccacttccctccccacccaaaccaggaagtactggccacagggcccagggacggctgcagggagcaacaacaaggagcactgagggcccgggagacgctggtctcaccgtaatcaatggactgctcagtgcagcccacaatgccctttgctttctctcccttttggcttctctgaaatgatcacggggtatcaagctcctgctgttaattaaatttgcatgattcagtcacattcacttgtgcatttgagacaggactcaaaagttaaatggccaaggtctgacacctccattagcacggcctcgagcagttatggggcacgaattgatgacgagcgcctcgcctggacttcggaggccccagacgcagggcttattgtgcagctggctcaagggaagcctacagaccctttgctactgagcaaccacactctcagcaccgagttgaccccacagcccggcacaaaagcaggtgtcagaaatacaaaaggcagggccatcagcgaaatgcgtggctgggatcaacacatcaactcggactttctggctccataacaaacaccctgcgtccctcagttgttcccagctctgcctctagccccctcccttcattgcctccagctgtgacaggagtggaaggcaacctcacggcagagtggggaagtacaaaggatctgattttgaggccagcgccctacagaggggcatctcagccatcagtgtggcacctgaccttgtcacttccactcccgttatgggcctgaaacctcccaactcaccccaactgtgcggagggaagccaccaggaaatgcattcccgcccctcctgccaaaaagcgcctcccaagccagaggtctggttctcaacagaagagccattcgacagatacaacctgaaaagctgcaagcagcttttctggcaactgtgcattgcattctcttttaaagggcagagataattaagtttagatagtacttatttttcatgtttgggggctaattatagtaaaaaccatttaaacgtcatcctaagggatatgcgtgccagactcccacgtcaaaccagccaccgaaggcttggcagccatgatttggtggggttgatgagaaaagaagaggtgtggccacacaagccctgcaaagctggctggagaggcccctgaggggctctggactccctgaggccaggctggccagggcaggaggcagccactcagagggagggcctgcaccctgccctgtggggagtctggggtccagcaacggtacttcatgtcaggccccatcgcatgggaagtctggatggaaacaaccagactggaggccgggcaccgtggctcacgcctgtaatcccagcactttggaaggccaaggtgggcagatcacctgaggtcaggagttcaagaccagcctggccaacatggtaaaaccctatctctactaaaaatacaaaaaaattagctgggtgtggtggctgtaatcccagctactcaggaggctgaggcaagagaatcgcttgagctagggaggtggaggttgcagtgagccgagatcgtgccattgtactccagcctgggtgatgagatcaaaactctgtctcaaaaaaaaaaaagaaaaagaaattactggactggggaggatgggtcagcagagaagctgctgtcaccccacacacactcccctcaaatgccaaggatagctttgggaggagagaggagaagtcctcctacccaaaggggctctcgtcctccacaggggtcagcatccagggaccccagttgggccctggcatggatgagagaggcctttcccagtccccggagtcaaagcccatgactgcacactctgcagtgactgccagcaactgtgggggccacgggtgggaaggagacattaaattaatgccacacagtgcagacacgaggagccctctagaaaatgaaatttcaaaaagcaggtcttgctggctggctgaccacctgcatgcgattaatgaataagtaacagggccaaattacagccatcaccatccatttcccgcggcccggcctgccttcagctacaaacaatgctgcctcgccgactctcactctgctctccacagaaggcagcggcatttgctctgcggtggaagccggcagccatctgaggatgttagctggtcagagacaaaagcagacctcgccacagtgacgcaggtgcctatgcccaaagaccactcccggagcaagcttcctcacaggggccacagagggaacagcgctgcccgggaggctggagaccaggtccagtgaccaggcctgcccagggtcagtgcctcaaaccacccgggcagcagccgaaggagctcctcagccccttctcagaggcctgcacggcaaagagggcccccgacaccctgccaatcacaaggagcgtgggagggaggcaccagagaggctggggaagcctcgatcctggggacacttagtggggcagagctgggaaaaacacacaacacacaacacacaacacaccctcatcacaaacaccctacacaacacacacacctgcacacaacacggcacactcacacccaccacaccccatcacaaacaccctacacattatttactcacacacccacacacccacatacaccctcatcacaaacaccctacacactacacacacccacacacaacacagcatactcacacccaccacaccccatcacaaacaccctacacactacttacacacccacacataccctcatcacaaacaccctacacactacacacacacccaatacaccacactcacacccacaccccatcacaaacaccttacacatcactcacacaccctcatcataccctacacactacacacacaacacagcacactcccacccaccacacccccatcgcaaacaccttacacacccctcagacacccacacacaccctcattacaccctacacacacatccacacacaacacagcacattcacacccaccacaccctacacaacactcacacacccacacactctcatcacaaacaccctacacactacacacacacccacacacaagacagcacactcacacccactacaccccatcacaaaaaccctacacactactcacacacccactctcatcacaccctacacactacacacacacccacacacaacacaggacactcacacccaccacaccccatcacaaacaccttacacaccactcacacacacaccctcatcacaccctacacactacacacacccacacacaacacactcacacccaccacaccccatcacaaacaccctacacaacacacacccacacacacccatacacaccctcacatgcaccctacacaccacacacacagcacacacacacttccatcacaacctacacaccacacacactcccatcacaaacaccctacacaccacacatgcccactcacaacacagcacacacatgcccacacacactccctcacatgcaccctacacacctcacacacccacacacaacacagcacacacacactcccatcacaacctacataccacacaccacacacacacccatcacaaaaaacctacacaccacacacacaccccatcacaaacaccctacacaccacacacacaaaacacagcacacgcacacccacattcacccctcctcataaacaccctacacaccacacacccccatcacaaacaccctacacaccacaaacacagcacatgccccccccacacaacatactctacatgcatcacacacccccaacatatgtcctctccacatcacatccatacgtacccacccctccacatgcaccacaccacacacaggtgtgcactccatatgcacacacagccccccacacatacaccatgcatgtgcaaaccctcccaccatacccgcatccatctctcacacaagatgtgggtatggccctgggaaggctgagcgcccctccctgcatacccagagccggggacggaatgcgttacaaaggttccaggagggtcccccgacctggtcaaactggctccccaactctgggctccgaagctgcctggggcgctgactcacagaggcccacagccaaagccaccctccactaagcccaactccgatgaaaaatgatgggaaatgctctcacatcaaaaagacaccacacactattgttagcagagactctgaataaaaatgcattcagagctaccaccctccccatcccagaacaggcctggggtgaggagtgggccggcttcaggctgcccacggcccctggcgtctgcaaccctgacaacagcaagaccgtttccacaggaagcggcagatcctgcagacgggggtgtcgtttccctgggcgactttggattgcagtatctgccagatggattttcaaaaaccatcagatagggactcaaaaggaagctgaggagctgaaggtcaaatgtgaagtctggtgggttttgcttgcaaaggccaggtactcccgtcagcctcgctcctggtgccctattgattccaggagcggctggaagcagccatacgcaatcagatctggccactccccagctccagtcccacatagtcaaccccgccaccactgctctgttacaactgagccttctctcctgagggctcaggatgtggagactcagacagggtcactccaggacagtggaacggagaggcctgctcggggtggctgtggtagggagccaggacagcaggacacaaggctctacctctcagctatggggccagatgccccctcgggaccaaggctgcctgatctgacctgcccagcatgtacacagccttttccaacaggggagacccctgttggaaacccctggaaaccccaggtggggccctgtttagcccctgatcagaccctccctgaagctgtttctccttctctgtccatccccacatctcacagaggaggcatccgacctgactgctgagctacttctctgagcagtgggacatgtcaacaggctctgagccagcagtgagggccatgaggaggcgagagggcagccaggtcaaaactgcaggtgtcacccggagccaagggtaccctggcacaggggccctcgctcgtcctgagtcgtgccccttgcaagaaaggctgaggccacaactctgctctgggtagagaggggatgctgggagaatcctcctgcagaaagcagacctaaactcttcgtcactgctgtcccagttacaacggctggggaataaacgactccaacacttagtggagtgcaaaaccaccaatcatgttcatggactctgaaggtcgggaatttggaccgagccccgagaggacagcaaagctctgctccacatctaggacctcagcagatggaaggctgggcctcatgcacgctggcggctggtgctgctggcggctggggtccccctatggggagtctgcgcttcctcatgatgtggcggctgggttcccagggcaagtaccccatgggagagaaccaggtggaagccacagtgcagtttacagtctagcctcagacgtcacacagcaacactgccacatccgtcatgaggcccagacctgggacaggcagaagggaaatagatgtcacctgcagacagcgagtgtccagaaacactgctgtggccatttttggacaagacaatctgcctcctggaaccatccctgcctcatgtcagtgtcagagatacagtggccagcactgtaactccagtcctggggggcctccagagcagcatcacagagaaggaactggagccccaaacatgaccagacccacttgcaagccccacggcctctcagaagccacacttagccagcaggcaagctcagcctccaattgcagctccagcaagacctggctgcaggacctgcacaggtcacaccagcacgctgagccatctcctcttttgtaacagggcagtcataaggattccaccgggaatgggataaaggtcgacaataaagatcacgacaggatgggaaggcattgtcaggccagggcctccgaggggcagcccggcagaagccccaaaggcagttggcccgggtgtgtccactccgtgcccttcttcccaggggccgagccaggagaccacccccaggagaaacagtccccttttcttctgctgccaattgtgctccaggctgagtcctgcccagcaaagatcccagtcttgccaggctgggatcctgccaagtggcctaagagcagaatgattaccaacttgtaagcctgaacccctctccctgagacagcaggagcagcacacaccatggccaacgaaggcagaaacggagtctgcactgaagggagggtagcactggaagcaggggaagctccactgtggccccagtcctcagcagagagcccagtccctgtggcagccaggggccttgtcactcaaaccagccacagcctctgcagcccacctggtaatgagcattctggggcaccaggcagcaaaggctgcaatttatacattagcccagaataatcactctccaggcggagatgacacgcagtgaggcagccagcatttagcgggatcctctgatcacctcaaacctccctggttaagtacagtgtccgccctggcaccactgagcaggcagaacagctcctcggcggtggggagtacctggaacagcaggcaccatggagggtggaggagggtgcccagcagcccgagcctctgctctatctcacaggtgagccgggagggcaggacctgcgctgcgtccagaggaaggcagcaaataacacacccagcatatcagcgatgggcctcagagaggcggttccccgatccaaacccaacccaccaccctcaggcacgcacagggccatgccacacctgtcgatgccatgcaggagtgacggcctcgcagggccaaaccctcaggcattttcacagacggagaagctagaatttcaggattaacaaactgcacttctaaacaaacaaggcccccagttgacagggctctgatgagtggaggaacaccagggttcttggtctcgagttgaattagagaaaacgacatggacacacgtggagtggttttaaggagcggagagtttaataggcaagaaggaagggagaagacagaaggaagaagctcctccatatggagacagagggaggggggctccaaagccaaaagaggaggtccccaagtgcagtggacaccagccaagtatatatgcagaggctggaaggggcgatgtctgatttacatagggctcaggggattggtttgaccacgcatgttattcacatagcccactaaaaagctggctctcccaccctagtcttttaatatgcaaatgcagggagccatggatgttctacacatgtggggatatttggggatgttctacacatgtggggcggccatgttgccaggaacatgtgaggcaagggtaagaaggccttgggaattgccatgttgggtggacccagtttctaatggcctgcatttgcatatcaaaggttgccggcctggctctaggagctggggctttaccagaaaacttcccaaggaccccttttcctctctatctacctaaaacaatttctcaataactcctaccacacagtcatactccagctctaacatcccttcccagccaagggtgcagggctctggcgagaggcaggctgtgacagccctgaccgcatgcccttcctcctgcagctcttccctcctccccgtccccaggcccaacccagctctctcatcccacctcccctacccacccccagcccatggttggtagccatggtgccctggccaggctgctccttactttcccatccaggtggcatggctggcaggaagcctgggcacaaacagggtcgacttcccagtgtcaacatcgatgacaccatagcagcctggctcagtgacaccgaacgcccagtgaaagaaggactcctgtggcgggaacaagaactattgttagccagtggaacatgaggtgcaaggagggaccggtggctgcatcacagcaccctagagagccagctcagaccgacagcctcctgtaactgaccccagccccagacatcccttcccctcagcactcgactccccagctcatcctcccgtagtttggcagggggcagcctggcagctcctctaccctgctgggagccctccctgatgctgtgtcaggcatgtgcctgagtccacctgtatccccacccccgggcccacaacagggcgtccagcagcaccacacgtccagctcaaccctgcctctctgccacgtgcaggcaggcaagacgccccccggattctgacgcccaggccggatatctgcacagaaatggattcctccatttaagacttcttacttccctctcccacccccgggacggctgatgacttcagtgtttagggatgaatgctgcgctaaaaggacgtcataaaggtatggtggaggaggatctcttccaaaattagccttgcataccatcagaaagggagccaacagctgaatttaggaaatcggtttttaagccgcagagtatttaaacctggagaagcatcaagactagccagagaaaacttatttagacctccatgtttctcacagccatgggattgcaggcttgcagctgcgcgaacaatggagtggagagacgggacccttcaggcaggaggtgcttttagtaaagaaaaaacacagtctgcggtcgctcagcaatgggtctcagcccatctgtggcctgctggggcgacagggtccagctagggaagccacgccttcccatatcctctccacactcagctccccttcgcattcccatctctcctcttgccaggatgctgcatggacacattccctaggctctgcctgccccagagaggttctgaagttcctgctgtggtcaggctccagctctgggcatggcagcggggagaaaacagcactagatttagagttggaagacaaagttctaatcccagctccacctcttggcaagtcatttcccctctgagcctcagttttctcatctgcaaaatgggtataatgctaagatgtgtgaaagtgggcccagctcagagcctcacagtcttcctgggtgggtgtcctcatgttcctgtgcctggggactgagtgctgccagtgactctcagccatggccaccatggccaggctggtttcctgcagctgggccacccgctgccccacatcttcaagttctacatcttcaaggagcccctggaccacttcccaggcgaggaaacagaggctcagggagggccacaaggggcagcactggccaagctggggcctccaactcctgctcaggacagcagcaccatcacacacctgctcacttgtggccaagcggggaggctcacctggcggaagaggaccccggtgtcggtgcagtagcgctgagtctcctccccgccctgcaggaccacgatggagccggcctgcacagcagggttcttccgcagccgctcacacaggcgctgccggttcaaggcaaagagcgccagcggcaccttcagggtttcattccccagccaaaacgagggtctgcagaggcaagagcacacaccgccacacaggcctctgttagcatctccaagcatgcccacacctgaggtcggggtgaccggaggcccgagcctgccgtgggacccccatcagcacggggcaagctgcccaagctccacctacttatgacccagaaacagcccctcactgatccccctgaggaccacaggggcttgtctcccctccaccacccatgctgtcctgactccacccccctgctcctctgccccccaaccaactgcacagcaggccacagtgaccccacgctcccgaatctgcagcaggtccccagtcctcactggccacttggtgcccatgaccctgggggccactctctctgcggaaaccttctccaacagcagccggtccaggctccctaccaggcaggcccctggctcccggctcaacctccctgctagaggccagcttggcccaaccctggggcctcttccctaactggctccctccctcagctcagctgagcttacccagtccttcagctcaaaggaccatctgcatctgcagactgatgatgtccagctccagactcacagacccatcagccaccctcagcaggcagaagatgcacctgaaccaaagtcgctcctccccagcctcccccgacacaaagcacctgcacctggacagtcccaaaggccatcctggcctcctatctcatcccacctcctggccaccagcaaggtctaccctcattgcacatccccatccccagggccacctccccatgtcccgtctggacaactgcaggcaactctcaacggtgctcttggccgcaacttccccgtggcctggtctgcaccttctgccagaagggccctttcaaaatgccaatcccagcacacactccctgcccaaccccgtgccagctggcttctctgagtgcagacttcactccccagccacaagggatccagacccccagttcacccttggcttcctctactgtggcacgggcatcctcgctcttccctaaacccccagaacactccagcctttgccgctgcggcgccctgtggggaatgctcttcccaagggcatcccatgcccttttacccagcctctgcagaaatgcccctttcctacccaccccagcctctgcagaaatgcccctttcctacccaccccatcccccagctctcttcgtgtctctctagagcccccatcactcttcatttatttgtttgctggccctccaggtaacatgtaagctccctgagggcagggacagagcaggtgtcggtatctatggaatgaatgaaaaaacggatggtggtcccagcaagcaggctggaggccgggtgtggagagataatggggatgaggtggaggaggagtaagcaggggcagggtgtgcaggagggagcccctgcggctctccagccagggggcagtgggtgggcacggaggtcaaggaggcagggacatcccagagctggtgcgagcagagagctctgcctggggactgcagtgaagctgtggatgaaacctgccctcacagcacagcacggtgaagtggtctggggcacctcacactcacctcacatgggaccctcagaggccctgaccctcctgccagggtcacatgagcaggtcacacctcctgcacatcttggctccaatacgaccttttccggatggtcttccccggcctccctctttgaacctgcagctcttctccttgcccaatcccctactagtccctggcctgaggtttccccacttgccctccagatacacccccctgcactgtgcccagaggccaacctacccgacctcctcagcatgcacgctgcctcctgtctccaggcgcactgagccaacgacaggcacatgaggctggggtcaggaggagagggaggaagacagtggatccactcccctggctccctccctggggaccctggaactaaatggctgggggcacccctccatccagggccgctgctctgatgacagcgccctgccccacagcacagcccctgctgggtttctgaccaggttccccactcttctttccactgtcttcctccctctcctcctgcccctagcctcatgtgcctgccttcccttaacgttcgcacagctctgtgtatcgtcccctctctcaactctccttagtggccccctggagtaaactcctaacgtggggccaggtccctggctaacacaacacttagcacacagcaccttccaacctaaacgcagcgggtgctgcctggtgcttcctggtgttctccggcccgccgcctcgggtggaaacactgggagatggagctccaggttgcctcggtcactgccgtgccctcgcctggtgccttgcctgacacacagcaaacgctcaacacatatctgctgaatgacacacggggccacacacacagctgtgggatgagaagatgccacatcagccgcagcagggcaggaagcagccctggagtcccagcctgcccaggaagggtggagggtcagaagcagccgcacatgctgacatgactagagccccgcccgctcccccacgtgcccttcctaccctcccaggagggtgagcaggtggctgggtggacaccagcggccagagcttcctctgggctggggctgcttttctgccacgctcagccattgggatgaaagggcagagggaagtcggtgagagttcgtaaacatgaccacatcccagatggccatgctgtcaggagctaaaagtgcagtcaccagcaccttgtgctcggatatcccccatggcctcccacgccctttcccttcactcaggaaagcccatggtgggatgggcacagaggcaaaactcgtctctgcagaatccccaacagcttaggggcaatgacaccgagaccctgctatggacagcctcagccacagtcgtcgaatagcatgaccggccgaaaatgcccatcctcagccaccagcctgcatagcccagcccagcccacctctcccacactcccctctccctgcctggccacactccttaatcataacaggtgctggctccccatggcctgacaccatgcccccacctgtaatgctcacagaagggctggccttccccttgttcagaaccttctgagagacaaatttctcagggcacccagactgggatcccaagggctgagcagaaaacttgataagccaccttctccttgaacactcagctgccactgcaaagaaaatctacaaccatgcttatttctccatggggctccgccagaacagaacccaccctgtgcagggctctgagcataagaagggctagcctgagccacgaggcaaggcaatatgctacagtcattaattacaggacaccaagtaataaagttttatagagacatgccctttgatttcccatggcataaaccaagcccccagagagactgtcaggctcagagtcaacacagacgaattcttcctgcaaattcggcaaatgtagcaccaacaaaacatctctaacaggtttctgctgcagcttttgttaactggcacccagaatttaaaaggcaaaagccattatcatccccaggtcccagggtaaataagccatgctttgctgcagacagacaaggcacaagagctccagggcctcagagacccacagaacaagtctctgagccccagaggccaggacccccgctgccctggaaacaaccaagacccagtaagcagcccaggaccaagaacggagtgaccaagactgaggccagtcctcaaggagggtatgatgccactgcccccacaagccgtctctgtctccacacaacccacacccccgtatcagtactgggacaccctctcctcaacagccacgtgcagggctcttacctaaggcctagggacccccaaggattcatcctcaaattcaggggctccatctactagatgggaaaaagctgtacctttattttctctaacctccaattcgaatttacattttcttcagttattaacataagcaacaaactactcagtgtcagcaatgcatgttaatctgtcaccaacaaaaatcaaaggtattttaataccatgttattgctcttccagtatctcaaaatatcacttttgctccccacaacttcaaagttaaagtagttgggccaggcgcagtggctcatgcctatcatcccagcactgcgggaggcaggaattcgagaccagaatgggcaacatggcaaaacccccatctctaccgaaaacacaaaaattagtcaggaatggtggcttgtgcatgtggtcccagctacccgggaggctaaggcaggaggaacgcttgagcactggaggcggagactacagtgagctgagatcgcaacactacactccagcctgggggacagggcgagaccctgtctcaaatttatgtaacattttgatacctgtatttccatataattgggttttacttttgtaatattatgtacttatttcatacatttaaaaacattatgccagccaggtgtggtggctcatgcctataatcccaacattttaggaggccgacatgggcagatcacctgaggtcaggagttcgataccacctggccaacatggtgagcccctgtgtctactaaaaatacaaaaattagctgggcatagtggcacacacctataatcccagccactcgggaggctgaggcaggaaaatcacttgaatctgggaggcggaggttgcagtgagccaagatcaagccaccgcactccagcctgggtgaaagagcaagactccgtttcaaaaaaaacaaaaaacaaaaaacaaaaaaaaacctgatgccgagaatggtacgtaggtttcactgatgcccgtggggtctaccgcacagacaaggaaagatctctgcactagaatgtggagccactggccaggtgcggtggctcacgcctgtaataccagcacttggggaggctgaagtgggtgggtcacgaggtcaggagtttgagaccagcctggccaacataatgaaaccccatccctattaaaaatacaaaaaaattagccaggcatggtagtgggcacctgtaatcccagctactcgggaggctgaggcaggagaaccacttgaacccgggaggcggaggttgcagtgagccgagatcgcgccattgcactccagtgtgagactccctctcaaaaaaaaaaaaaaaatgaaatgtggagccacttctagacagggtcacaccgctaagttcccagtaggagaggccagccaaggaccagccacctcctcccctcagcctccagcgtggggccaggcaccagacagatgctcaggcagcccactgggcaccagaccgtaagcgccaggctggagagggttgccacggcggaacaggacctcgaggcaactggccagcaacctccaccttgcacctctgtctcctggggcggataggggtgccaagcatacacagaaaccaagagacagctgtgtggagtcaggacctggggaagagccagggaaggcacagggatactcagtggccagcctgcctcccataggcccacccgtccctagcccccagtcggcctgagtcttctgctcctggagcacaaggttcacattgtggggttgggctcttgacccagaatgtgaattctgcagaagactctccagaagaatgctgactccagtgtaacctacggctcaacaggggtacacgtccagggcagttcacctttgcctctttttggctctgcaacagctcctgggagccactcagttaaagaattaaggctatttcttcatcctacccctcggaattctgtccccattccccaccatgactccttccctcaatcactgggagtctcccaggaaagcaggatgggatgctggactaatttagagtaaatccccttttcattcatttcaccaagcaccaatcacagggcagccacagactggccctgcggatacaaaagaaccccaggggttctaaggatgctaggagaggcatgaagggaagcaactcctaacccacaatgggcagacgtgtaaaagtgtactgctggggagaaaactgagtgttctggagttctgagcactaaacctttacccgagggctgggaaaggcttctgggaaagggaaccatctgagctgggcctgcaaatacgtgaagaatcatatagaggacaagaacattccagggctagttgggtgagtgtgcaagggaagaagggaatggaaaaagccatgtgggagagcagatgcagacaggtctggctggagctgacagatttcaaattatcaatcctgtctgtggaaagctcaaagcattgcttaaggagacagcagcagtgccaccaagtgccatgggatagggacccctctccatgaggggatgggaggtgacctcagcgcactctgtctcaacctgaagcctacacccaggctagcaagagaaagtaggatcaaccctgaaacaccccacatcttaaaaagagagatgcattcagagtagattcttgagtttcaaattaaatctgagatgctagtttagggcttcccctactccccaaatcatatggggcacaccccagtcacctggaactctcatggaccccctctgtcccaggctctggtaggattctacagacaaccaaacccaactcccagtgagcccacggcaatggccgtgacttgctggcatcatgcctcgttatgcctgactctatgatctgttctgtgagtgtggctaggagctgagctttgcgggaaacacacttaatcattctgctctaaaggaagccactggggtcaacctcaggctcaaagtacatgggaaagccccataccagactgggatggctcttcccaaggagactgccaggctctggaagctcccacaccctctcaatagcagacctctctaagacctgccactctgttttgcctccctcacccaccctgtgtggtggcccagagaatcggttctgctagaaaagctctcattctggggccaggcgtggtggctcacacctgtaatcctagcactttgggaggcggaggcgggtggatcacctgaggtcaggagttcgagaccagtctggccaacatggtgaaaccccatctccactaaaaatacaaaaaattagctgagtgtggtggcacacgcctgtaattccagctactcaggaggctgaggcagaagactcgcttgaacctgggaggtggaggttgcagtgagccatcatgccattgcactccagactgggcaacaagagcaaaactacgtctcaaaaaaaaaaaaagaaagagaaaaagaaaagctctcattccaggatccagtcagttccagacttgctcccgtccagacatcagcttggttccttcaggagagcagcaggtctcaggccagcttggaatcctgaacccaaatgcaacccctggcactccctgtgagcaccgagccagcctaaccagagagacagcacacccacagctgggcaccagcctgctcagtctaccctttaaaagggtcacaggctggattcaaggatctgaccctgagttccttgacacccatctgagactttgtctgcactgttctctacctgaagggagtctcattgctgaaggactagcacaaaagtcacccaggaagtgaagccttcccacactttatctgagctcagagtccatgcccctcctttgcaaatggcaagaccacacggcaagcagatggatgacagagtcccatgtgtccatctgttccagtggcctgtgagtaccttaagggaagacccactgctattcctggaatatagcaggtgcccacaaaatatttgatttgtatgctctaagctccctcaaccttgggggccaacttagaacccactttctgttgccattttccctgtatcttaaaaagagagatgcattcagtccactagatcccccattctgacctcagtttccaacctggcatctggaatactgctccctcctacaccatgccccctctaccccactgtaccaccagacccacaccttctcccattgaactcacacatagctcaggggagcctaatctttaaaaaacagatcaagcagcttgtaacaaaacccttccagcccatcagggcaaagtctgaagccgccacctggaacaccacaccttccaaccagccccaggcatgcacccctgtccccagaacactctgaactctcaacctttgtcccttaccctgggctcagatgctccctatctgggagattccgcccaacgctctggtgaacccatctgtccacccttcctcccactacgaccactcagctttctttcatttagcccagtatggagcacctactgtgtgcaaggcaccgggctactgagaagcaggtaacatacctgcccttgcactctaaatgcagagaagataaagaacaagtacaaacaatgctctatatagtttatcaggtgatgatgagggcacaaaaagtgggatagatggttagagaaggattccctgagggggtgacatttggcccctgaaagaaatggggaagtgccctgctgggaaaagggaattccaagtccgtctcgaataccgcctcctccgggaagcgcccgggtccctggggtcctcgcaacgccgccctcctacccgggggtcttggcagcgaacatgcgtgtcgaccccagcccccaccgcagccgcacacggtggggccgccagacgcgggcaggtggggccggagccagccaggagggtggagaggagctgcggcccccgcgctgaccctgactcggagcgtgcagctcgccgaccggcgctgggactccgggccaacgggaagaggcgcctacccgcggcattcagcgaccccggctgacgctctcacccgcggtccggccgggacacccatgcccctctccacgccagcgggaaagagcgagggaggcgcagcactcacccggtggccgccgccatgttcgcccggcaccggcgtcacgtgaagtgcggcgtcagctgagcccctccgggtgccaatgcatggggcggggtaagggcggggcagggggcggggcatggagtccttgacccacctcctccagagccaaattccacgggacgggaaggggcggtacctggggaagggcggagccccgatggggcggggctcccggagattgggggcccaagagctcggccaggataaatgagcgggctgccggctgcagacagtaggtcgggttagcgggcagcatctgcagccttttcgtggtgggagggaggtcctgaagcagaggacatcttgattctggttcagtccccgatctggcgtaccagcccacccgggagaagaacacataggaataaagaaaccacgtgggaggagaggagggagactgacccaggctagggtcggggcagaggtggcgatttttgtttaagaagggaaagggcttgagcaaaggccgtggggcaactggaggactctaaatgtgcagcgtccaggagaatgtgcgcgagagaggggcagcctaagggaagcaagggccagaccctgcggggcctccactgtggggcctatgagttaagtctggtaggatcttttctaggtttcctgggctgcagaatggagaagctggaggaagggaagccagggaggagggcaggcgagaagtgggcacagccgagaagggtttaggagggagagtctgccagaaggcttactcctctgccccactgggcactggtactgggtgcagagtcctgcagagaaggtgtagggaccctgcagcagacgctgccctccctactgccaacagagtcagggcattacaagcacggcccaaatgcgttgcacatgtgagctcatagaaacctcaccacagccctatgaggtcgagactatctttaagtctattatacagatgaggaaactgaggccagagagtgctcacacagaggctgagctcatgaagccataccctgaggagtgacctcactgcccctgtgaaggaagggggccccacactgttgggggagggcgtccctggcgccaagggtgtacagatgtgtgtggtgtacagatgtgtgtggacaggtggatgggtggcccaggataggcgtgtggggctcctgaccccaccctgcagctgtcccacagctggaagtggcttctgatcaaaggttgtgggttgggggatgcttcttgtttctttatcgaaacaaggatgtgggtcaccatggccaggctggtgggagccaggggctatgactggagaagcagcttctgtttgtccccatgaagcagggaggagaataggccccttaaataggagcaagggagccagccataagcagggtagtgaagggcacgtggcacagttacctggaagcccagtaccatccctgctgtcctcatctgtcaggagagagctaatggggccacctcacagggctgctagagggttttacactcaaacctgcaggcacagccagagaccaaagctgccaggaggaatgtggcccctccagacagcccctcccacctcccggtcccagataaggaaaacgagagctaatggaagagggggggcctcatcccttctaccccttcccacaacacatggacaatttgcaggggtccctgacctccaggcaaggtccaagaggagctctctccaccctcttgccagtttccaggaagaagaacagaggtaaggattcacaccccactgcctggcctaggggcccctgagaacttctaacacccctagttaagcagtaggtccgccttcagcttaagaaactcaactccctagtaagtggcgctttaaaaaatacataataacaaagggtgagcagaatgagctttccatgcgccttcaaggaaggaaaacataccccccagctcattcattgcacctgcctcccaccatttcttttgacataaaatatgtcaaaattaagccagctgccagctctgagtgcttactaatatgaaaaagaagtcaatatcccaaacacaaaataatggaaggaaggcacccaccaactgagtggagctcccttgtttgtggacagtaatatggaggcactgcccatgacccctgcccacccaggtcccctgccctctcccctccccatcaggggctccggcagggctgcccctcacccctcacccctccccatcagaggctgtggcaggggctccagaagccgcccagaatatgggagaagaccatttagttacttatgcagggcagacccaggacgttgctggagccaggaggcaattgggggaagattgattttagagagtcgaagtgggagtgtgtaaatcagccaaggcagcgcgccaggcagcactctcatgcggcattgcctccgaggtcacaggcccttgtggccgaaacagtctcctctcgtcaagccctgcaggtggctggtagatgtctgcactcggtcagcctggtagcccggtagccagcatagcattattctccagaagggcccccccaactcccgtcaggccttgcaaaagaagcttcaccctgggaagacacctcttgtgtcccgggacactgtgtccagccaggtttccctcctccacccattccccacaatctagcccccactcttgcaactccgtggacgctgctgacagctggctgcctggagacggcaggcccagatgtggcggcctgctaggctctgactcatgagccacccttgggccatgaaggggaggtccccgggaagagccctgtccatcttctgctgtggattgagggcactggtctaccagaggctctgtgggactgcactggaggtagcctggatgctggttctgccctgcaccacccagttgttgcccacagtgccactccaggactggccatgctgtgagggccagggatccagaccctgcccttgcctagaggatctttggtctggggacagaggtagaggagccctccacactgtccctggggagtccaccatctgggagggcctcagaacggggcttcgagggttctgcttttggctaatggggagatcctgggggattctgagctgcaagctgccgatccaaacccctctctccagcaggagctcaggaggattagcagagagaactgaaaagagccaataagagccaataaagccactgcacggggccgccagcctcagatggtcaaagccctacacaagatggcatttgggtgttttgcgattgtttgcttttgctgagaatagaagactggatgcagaaagccagcaccaaataaacagaagaggaagaatagaggggactgtgggtgtgagataggggcagggtggcatatggcaacccagtgtcttcccaagtgggaaagcaaggagcgtgatgggtgtggaatgcccaggagaccgtctctctatcctggttctggcagatcccagccttgggcctttgcagggcctgcagaggtagccacagctctcccactccaaaggcctgtgtggcctgctccttcctccaggcctacaccccagctgtcaccaccatccatcaacccccctcctcacaggagcccccacatcacgttctactcctcctctcctttctcccccagcccagcccacctgggcatctatcttcctgtagaaaagaggcaggcagagctgaggggccttcccaaggaagcccccatcaccgcctcagatgaagtggtccctgctgaatgctttgctggggtctacgaggcaattcaagatgagaaatggaacggtggcttcggaaaagcaaatcattccaacagcacctgaaaacatcgaaggaaacaagctctttttgtgtgtgtggaaatggggaatatattgtttctcactgtttcgaagactgttttcccatcttgaaatcacaagctgttttcttccagagagacttataaatacatccaattatcgacattcaatataagaaataaagttctgaaatggttttcttcagcacatgcagagtgagccgaccaggttgggcaggtgataattacttttatttcttacgagtgggtatcaccgcggagtggctagaagcttcaccttttattgccttcaccttttattacatttcccacgttgtgcagggctattcattggtaattttattatcccatatcaagatcttgattaaaaaaaaggatgaaatttctaatttcaaaagatatgagtgcaaagtcccagagtaggaggatttggtcctataccttgtgacctgaagagtaaccctccagggggatggactgtccttgtgcccagctccaagtgactgaatgtcactgactagacagtgggtgtctgctggcattcacaattgttcctttttttttttaaatagagatggggccttgctttgtcacccaggctggagtgcagtagtgtgatcatagctcactgcagcctcaaactcctgggctcaagcaatcctcccgcctcagcctcctgagtagctaggactacaggtgtgcccccccaacgcctagttaattatttttaattttgtatgttttgtagagatggggtcttactatgttacccaggcttgtctcaaacttctggcctcaaggcatcctcctgcctcagtctcccaaagctcaggattgcaaggcatgagccactgagcctggcctcaactgttccttttagggactctgctcagggtgtcattttaagaaggatgcttgtcattttaggatggtgtcatttcttttcttttcttttctttttattttttttttttttgagatggagttttgctcttattacccaggctggagtgcgatggtacaatctcggctcaccacaacttctgcctcctgggtttaagcaattctcctgcctcagcctccggagtggctgggattacaagtgcccgcccccacacctggctaattttttgtatttttagtagagacggggttttgccatgttggccaggctggtctcaaactcctgacctcaggtgatccacctgcctcggcctcccaaagtactgggattacaggcgtgagccactgcacctggccaggatggtgtcattttaagaagcatttcatgaaagcacctgccggtccttctgtccatgccaccatcaagatgagatcacctgtgtctcctcccgctccatccactgggattgctcctgaccccacccctgtctgcacttcctcctcaatgtcttgtctctcctccagcctcttccttcccgtggctcttttgctgctcacctgcataactacttggctgcagtcccttctcattctgagccccgactcgtcaagatttttctgtagcaagcagctcctgagtctcacctcaagtagaagagggatacattcaaatgctgtccagttgcacagttgcaggagagacagactcagaaaacaggcagaggcagggaggctggcagctgagtgcaccaccaggctacccccaggacatggcagctggcacagctgctcagacccttgccatcactctgcccttgggcgtaactgggactgatacagtgtcctggcttcaccccctgcatgctcaaagcgcttgatgggcagtacagccagttgcagtgcccaagtctcatgcccacaccttggctatcatgtcccttttggcttctgctgggggtggggatgtgtgtatatggggtgagatgaggtgggggtagatacacaaaacctacccccacaagtaaaaccttgaaaagtttagcttggataaaagcctgaatatttcaatcagaatgtctagaatgcagctattttcgttttagcataagtgtgaatttcttgtttgatggtttggtataatttaaatttttgatttacatgccgggggacaggatacacaattgtctttctttttttgagtgatggggggacagggtctccttctgtcgcccaggctgtagtgcaatgccaccattatagctcaaccttaaactgctgggctcaagcgatccttcagcctcagcctcctgagtagctgggaccacaggcgtgtgccgccatcccagcttatttccagtgtcttggctctggagctcttacctagctctgcctccatgtcattgccaaataaatatccctgagcacaaaatgctcgaatagaaactgtgtgatggagaaagaagtgcatggacttcaaagccagaagcctgggcttgactcctggcagcttgacgtctctggtcctcgctttccccgtttggagatgaagatgggatgggctttacctccctgacagggcagttccaaggggtcagatgaccccttgaacactaaggcccttgggggcagtttaacatgatgcaaatgtggtggtagttactttccttattgatacttactgctctttttttgtttttgagacagggtcttgcactgtcccccaggctgtagtgcagtggcacaatcattgctcactgcagcctcgacctcctgggctcaagcaatcctcccacctcagcctcccaagtagctgggactacaggtgtgcatcaccacccccagctaatgtaaaacatgttttctgtagacatggggtctcacggtgttgcccaggctggtctcaaactcctgggctcaagcaatctttctacctcagcctccaaagtgctgggattacaggcatgagccatcattcctagcagtacttattattagagaacctggacacagtggttaggaattggatgtaggaagctaggtccgattcctggcactgctatttacttgctgtgtggcatagggaaaataacccaacctctctgagcctcagcatcctcattggtaaaatggggacgatgggtcccagctgggaggattgttgagaggattagatgaatgtcacaggagacactcagctcagcccctggctcatgggggtgctatccttatttcagtggtcatgtgaggggtaggggcagtgaggagagacaagcatccttatctcccaggtgtgaaggtgggggagatgacctgtgaggtcactgtagccctgctcagctacagagcgaccttgaccgaaggagtgagtccataaccccaagcccagggggccagtgcttagcccctttgagaggactggctgggacctggggttgccacaccacctcaagcaagcaggctggcagtccagccaaacacagcagtgctaaagggaaagagaggaacaagggtgagcaggaagtcttccagggtaggggagatgcttcctcgctacacccagggcctctggtccagtccggggcttcagccacagggctctgcttgtgcgcatggatttgcatgtaaggaagagatagcctgcaaggaggtttgtaagaggaattagagacatgtaatagattgcagaattgacctcaaattcttctacgtgctgcgtccacaacccgcttttgtgatgttcaacccctcccatctagaggtagaatctatttcaccagcccttgaatgtggcggccacgtgacttactttagaaaatgagaaggaaagcttggaaggtgctcctccaccaggctcaccttcttgccattcttggaagccctgctaccatcaccatgggaagatgccctcgccggagggtgagatacctggtcaacagctaaccagcagacacacaggcgtgggcagccttgattatccagcctgaggccaactgctggcccatgagtgagtccagcagagaccagccaagccagcccccgcatcctgagctctctcagggatcgtcttacccattgcatccagcagcgttttagaccatgattataaccaacacagggtggaaggaggagatcctgggactactgccccagagagaaggctgggggagaccctgcagggcctgtgtgcacaaggagctctgcaaaatgcagggtccaagcagcactgctgtgtggccctggagagagagtgtgaccttcacctccccacccccgcctggggcacagcatggcttctgagcagagaaggctgcagggacccgtaatcccagctacatgggaggctgaggctggagaattgcttgaacccaggaggcggaggttgcagtaagccgagactgcgccattgcactccagcctgggcaacaagagcaaaactccatctcaaaagaaaaagaaaaagaaaaagaaaaagaaaagattaataggtacgactgttgtgcctcgttcagagagtcgcacggtctctgaatgagatgccaagttccctgatgccgtgatgaaatgacaggagtctcactcctttccccattctttctggatattcagttcaaacagcttttgggaaaaatcacaattttatttccagatctcagagattgatatcatactatgcattttagggcttgtggggaaatgaaccgaaatcatcctgcagtggtgaggccggggcaggggctctgcacctgcaggtcctccaaagtgatgccatctcagttcccagacgagcccacctgcaggacccactattgcccagcacgaggtcttcctgagctttcctttccaggtgtggccaggcagctgccctcattgctcagagtctcagtaccagccctgttggggcagcagccaggcctttcttcacagggatctgggagcagaagagacctaaaatctccagcaggtgccatctctgcttgaaaggaagaggaggccaaaactgggctgagaaaagctcatgaaattgttacgaatgttccctgaactccaggctggagaattggctgcacagaaaactgtttttagctttggatgtggcaccaaggacagactttgtcccttctgtcatcagtggatgcttgttatgtgaagactaacggcactttctgagggtctccaaatcctctggggacagtccacaaagcagaacgataagtgccaggctcctttgcgggttagggggataggtgggtgggaatgcagcccgcccccagagatgctgatttgctgggcttgagtgcagctcaggctcctggattttgctgttattgtttagagatggggtctcgctctgtcacacaggctagagtgcagtggcatgatcctagctctctgcagcctccaactcctgggctcaagcactcctcccacctcagcctcccaagtagctgagaacactggcacgtgccaccatgcccagccaaatttttaatttttattttttgtagaaatggggtcttgctatattgcccagggtgcaggctgatctcgaattcctaggctcaagccatcctcctgccttggcctctcaaagcactgggattactggtgtgagccaccttgcccagcccaggcacctggatttttaaccaacactccagctgcctgtggtttgtagccaggtttggagttcgttgtctgggcagccacgtaaggaagcagcctctcttgtgcctggaggtcaggctggccctactggctgcctctcctgagatgaagcttggccactgggcatccatttcccagcctggtttattccctctcttcccccagtgagggcccatcaagccctctgataccgactccttctgccctccccacagctcgggcaggaaagctcactggcctggccaggggactcatgggatctacaggggctccctactcccacccaagcctggcaccaagtacaagcttgctgagatcaaatgttgtagcgttgtgtggagagaaatggaaacagctactttggaaggtgctttggcaatatgtgtaagaaagaaaagaaaaggaaaagaaggaaggggccgggcacggtagctcacgcctgtaattccagcacttcgggaggccaaggcagggggatcacctgaggtcaggagttcgagaccagccttgccaacatggtgaaaccccatctctactaaaaatacaaaaattagccgggcctgatggcacatgcctgtaatccaagctacttgggaggctgaggaaggagaattgcttgaacccaggaggccgaggttgtagtgagccaaggttgcgccactgcactccagcctgggtgacagagcgagactccatctcaaaaaaaaaaaaaaaaaaaaagaaaagaaaagaaatagaaaaaggggttaattactactgactttacagaaataaaaatgattataaaggaatattataaataacatatagcaacaaattggataacctatttgaaacaaacaagaaataaccataaaaatgggcaaccagcagccattcttttttttttttttttttttagacggagtcctgctctgtcccccaggctggagttgcagtggcaaaatcttggctcactgcagtctgtgcctcccggttcacaccattttcctgcctcagcctcctgagcagctgggactacaggtgcccaccaccatgcccggctactttttttgtatttttagtagagacggagtttcaccgtgttagccatgatggtcttgatctcctgacctcgtgatccgcccgcctcagcctcccaaagtgctgggattacaggcgtgagccactgtgcctggcccaggaatagccattcttttattcctctactttctttctttcttttttttaaatcgaaactattttttattaaaggaaggtgcatttagattaaaaaaaaatttttttattcctctactttcttaataaacttgctttcacagtgctctgtggactcaccctgaattctttcttgtgggagatccaagaaccctttcttggggtctggatccagaccgctttctggtaaccaccatgggtcctggagtctgtggaacctgttcccagacacccctacctcacccccacccagcccatcaccactgctgtcctgtcccagcttctggttgcagagtgacacggtaaactgtctggggaggggaggttggttgctttgtgttttgcaggaaaaggcctggttgtgatttataagaatcacagacagagctctccaggggtgggaccaaggggacacttggggtctgtgaggaccaggggctgccatggctgatgggagttcagaccccgcgtgccgcgccccaattccccaccctggccccaccacccctgcctgcctcactccaaccccaccatccaaactccatctcttcctgctactgaccccatcttccaacctccacctcctggccccagagcccctatgctcaaccccagcttgaccccggagccccacctccaccacaccaaccactacctctgactctcatccccctgcctctccccctgccctgccccttgcttcccaccccagggtctgctagctcctcccacctcatctgctcagctctggagagaattgggaacccatcctttggtgaggtggctgctggtgagaaagaaaatggtatttgaggcttttactcatcaaggaagggaatatccccctccccctcccaggacttgcaaggcagcgcccagccccctcctccttcctggtttccagcctcctgtgtggtttccatggattcagagatttccttccagcacctgagccccgaagtgagggggaggggagggaggggaagggcccagccatctaggggagggtggtggagaagctgctccaggacggaccccacaggtccgctggccccgtcccctgctcccagagaccctgaggctgggcaccagaggacttgctggggactcgctgggggcctgacaaatcccaccctccttctggatggcccaggggaggtcatcccattgggtcatgttgggtgagaagagctgtctcaaatcctgaccctgtccctgaccttgacccctactacatcccaaatcccaagacctggtcccagaatccaagccctgggttctgacattcagtggactgtgaggaggacagttcagggaagggaccaaggacatccctgcatcagcctccatcctgctgagaactcactcgagtcctgtgtttctggggctccagtgctgcctgcatatctgggatcccagagagaaggcgagaagggtttatggtggggagttagtgagcatcaggcacttggggttctccatcctgcccagcatggccccttccagaacaggcacacggtgtttacgacctcctccccctctgccagagtccccactctgccagagtggcaggtggagaagctgtgggcactgtcgtggtggctgcccagaaccccgacaccctttctcttggagggcagctagggtgcaggcccaagcacggccaggcccatgcccctgcccaggcttagctcagccagaaaagattcgtcgtggctgcagcagagcaagaatcagagccggaggctggggcagctgtggtggctgcaagggcagagccagttgcccacagaaaagctcggcccaggtggggttccttccccagcccaggacctcacaggttctaagagctgcccaatatccttccgatggggtccttttctgcatacatttgtctgcgttcatttttattggttgcggttgagagctcatcctggcatgacatttgccagtgggtgggtaggtggtctacactcttggttaggctcttggagaccaactgagatccagagggactactaccatatgaggacccagtggtcctctgccctggcttccagtagaacctgctggagtttatttatttatttatttatttatttatttatttatttatttattgagatagggtcttgctctgttgtccaggctggagtgcaatggcgcaatcatggctcactgcagccttgaactcctgggctgaagccatcctcctgcctcagcctcccaagtagctaggactacaggcatatgccaccatgtccaaccaattattttattttttgtagagatgggggtctcactatgctgcccaggcgggtctcaaactaccaggctcaagctatcctcctgcctcagcctcccaaagtgctgggattatagacttgagccactgcacttgacctcttggagaatctttaaaagcttctagcaggtgaggcacagtggtttgcacctgcaatcccagtactttgggaggccatgggaggaggatgacttgaggacaggagtttgagaccagcctgggcaatatggtgagagctccatctctaaaaaacttttaaataaaacaataaaataaaagctgttagtgcctgaacttcaccccagaccaagtaaaacagaatttctaggcatgggaatttgtggaaactccctcagagttttcatggggaatactgggatttttgacagctccctggttgattctgctggaagccaggaccaagaaagcttcaagacagagtcctccccaacagggacagtaggtgctgggggcaggggagggaaggcagggggagcccctgggcatggcctcctctcttcccaccctgtgcgtgacagctcccccttggtccccatccctctgccttgcgcctgcctcccaaaggctgcccacgggtcctgctcccttttcctctttgtcccttcatcgcacagtccagatcttgcctcagtcttcacagtcagcccagatgactcatgaaacctggaaaggaagccattcatttgcaaccttaaaacagtcctcttctttgacccagaaactccgctcctgggtatacgctcagcagaaatgtgagccgacgtctgctggcagacacaggcgagaggtggctcatagctgcactattcaacatacccccaaactggaaactccccaaatgcccatccacagtaaactggatgaataaagtggtgttttcatccagtgaaattcacatcacaaagaggatggatgtcagaagcacgacactgagtgagatcagctagacacaaaagaatctgtgttgtatgaccccatttatttaaagttaagaagaacacagaagccaggcgcggtggctcatgcctgtaatctcagcattttgggaggccaagacgggcggatcaagaggtcaggagttcgagaccagcctggccaacatggtgaaacgctgtctttactaaaaatacaaaaaattagccaggcgtggtggcacgcacctgtaatcccagctacttgggaggctgaggcaggagaaacacttgaacccaggaggcagaggtttcggtgaatggagatttcaccactgcactgcagcctgggccacagagtgaggctccatttcaaaaaaaaaaaaaaaaaaaagaggaacacaggaaaaactaatctaaactatgggaagtcagagtcatggctcccggcaagcagtgaacggaaagggacacaggagggacttctggggtcagggatggcaggtttaactcgtctgggtggttacaggggcatatttggtttgtgaaaatgtaagaagctgtgtgcttacagctatgcacttttcagtgtgtattattcttaagaaaagctgtcacaattaatctagctgccctcaaggaggacaggggagagaaacgtttgtattcactcttttcaaggcaggaaagaagaaaatgtaacctgttaggtttcctttttttttcctttctttatttctctctgtctctccctttctttctctttctttctttctttttttttctttctttctttcctttcctttctttctttttctttctttttttttttgagatggagtcttgctctgtcgcccaggctggagtgcagtgatgtgatcttggctcactacaacctctgtctcccaggctgaagcgattctcctacttcagcctcctgagtaactgggattacaggcatgcgccaccatccccggctaatttttgtatttttagtagagacggtgtttcaccatgctggccaggttggaggtttccatttttaaaggcagttggacatttatatcctgccagggagttccccctactgctccccaaaagcttccttttactctcacacctggattgcactagactccaaggaaggagaaaacctccacttgggggctgggagacggggacaggaggagcagcagcccagcccagcccacctctttgtccctcagaatccactgaacacctttcagccttgtcccgctgggacggtcaggattttagggctctggggatcacttcttattctattttttttgtggggggtggggcacagaatctcactctgtcatccaggctagagctgaagtgcagtggcgcgatcaattttgtttgttttgtagagatggaggccttgctatgttacctgggctggtcttaaacttctggcctcaaacaaccctcccaccttggcctccccaagtgctgggattatagtcatgtgccactgcaccctgttcacacgtcatttcagatggtaaaaggagccaagaagaaaacagaccaggatgaccaagggactctagagagggtagagatgacactgaagctgagggttgaaagggcctgtctcctcctcctgccaacattggccttggcctcaagtgatccttccacctcggcctcctaaattgctgggattagaggcataagcccccgtgcctggcctcactccctatttttgaaactgtctcttgcttgcctcccaggtgccctccttctcctgactgcccctctggtcagtccttctccagctgctgagactcagcccaacccttgggaagaccctgtcttttccaactgcccatgaggtgcaggcaactccagcagccctagttccagctcagagtcttccctggctccatttctgtattgcccatggcccctctcagttatttccaggtgtattcatccgttctcatgccgctgataaagacataaccgagactgggcaacttaccaaagaaagaggtttattggactcacagttccacatggctggagaggtctaataatcatggtggaagaggaaaggcacgtctcacatggtggcagggaagagaagagagcttatgcagggaaactccccttttcaaaaccatcagatctcatgggactcatttgccatcaagagaacagcgcaggaagacccgtccccataattcaaccacctcccacagggttcctcccacaatacaatgggaattgtgggagttacaattcaagaagaaatttgggtggggacatagccaaaccatatcaccaggcaagacaaagccttaaacaggcacagcttacccaccgccctgctcactgccttggtattccccatctcagaatccacgaggccagctgtccacatcagagactgggtgttgcccactttcaaagatacatccaagccatcaccaaatgctgcccatccttctaaatatttctggaatccctcccctcgcccagccctagtctccctgccctggccaggccccctcttctcccaccccggttatcactagaaccttcaacaagaccctcccggcttctgctcagcagttctttaaatgaaaatgatctggctgggcttggtggctcacacctgtaatcctagctctttgggaggccaaggtgggtggattacctgaggtcaggagtttgagaccagcccagccaacttggcgaaaccctgtctctattgaaaatacaaaaattagccggccgtggtggcacatgcctgtggtcccagctactcgggacgctgaggcaggagaattgtttgaatccaggagatggaggttgcagtgagccgagattgcaccactgcactacagcctgggcaacagagtgagactccatctcaaaaaaagtttttgtttttttttttaaataataaaagcagtgtgatcttctccctcctggctgcttacaaggatgctacattactcttaggccatcggagtgaggcctcaagcccggctgcattttagctatgcctggatcccatccccagccccacctgagcctaactcctgggtgtggggcctcaaacattggtacaacttgaccgtctcctgtggtcagctccagccccatcttcctgtgttctccttaccaggtactgggctcctaggcttctgcacatccaagacgctgtgcccctgcctcaggcgctggtcctccctgccacatcctggctccacctccttcagatatcaacttggcccctttctctccttccctggccacccctgcctcctgcctgcccactgcccttgctgtatgcactcacccgcacctgcgtcatccccatcaacccacactctcctgggaagccctttgacttgtctgtgttcctgtggggagatagctcccaggagagcagggctcaccccagcttccacctgcctggcatggagtacacactcctggacaaagactctctcctcggccacactcaggctcctccaagccttcttcttgatgagggctcaaccttggcctgtaagaattgctgattcggcggggcacggtggcccacgcctgtaatcccagcactttgggaggcagaggcgggcagatcacttgaggtcaggagattgagaccaggctggccaacatggcaaaaccccgtctctactaaaaatacaaaaattccccgggcgtggagctgtgcacctgtagttccggctactcaggaggctgaggtgggagaattgcttgaacccaggaagcagaggttgcagtgggctgagatcatgcctgccactgcacaccagcctgggcgacagagtgagactctctcaaaaacaaaaacaaaaaaagaactgcagactcttagcccatttccatccaccagcacccctgcacccaccaatgcacaccaagagacttggagcaaactctagcctggggtctatcagctgaagactgcattcttgggaagacccagaccctgcttagagaactcaagcctgccaaaaatatttactgtctgttcctgccagcatctgaagatagggccctaatttcaataagcaccagttagcaaactcagatggcttaaccccagtgatcaacctcccctccccaattttctttttctttttctttttttcttttttgagatggaggcttgctcagtcactcaggctggagtgcaatagcgtgatgttggctcactgcaacctccatctaccaggttcgagtgattcttgtgcctcagcctcctaagtagctgggattatgggcacaaacagccacgcccggctaatttttgtatttttagtagagacagggtttcgccatattggtcaggctggtctcgaactcctgaactcaagtgattggcctgcctcagcctcccaaagtgctggaattacaggcgtgagccaccacacccagcccctacccacttcttatttcacctccctgactctgcacaaacccccactggttccacctccacccccttttccctttaaaatgcccagtcaccgctacctgggttagagttgagctgagttctacagtaaagtctctcctactgcagtagttactgactgaatagcatccatctttaccacctctttttttttttttttttttttttgagtcagggtctcactctggaggctgaagtgcagtggcacgatatcagctcactgcagcctcaacctcccgggctcaggcaatcctcccaactcagcctcccaagtacctgggactacaggtatgtgtcaccgtatctggctaattgttttaatcttttgtaggtgaggtctcgctttgttgcccaggctggtctcgaactcctggcctcagcctcccaaaacactgggatgacagacatgagccaccatgcccggtgtctttaccagctttaactagcatctggctttgtgtccctccaacatcctttagcagtggctgaacgcttgtatgacagacaggtggaatgtgaacaacctcattcccacctcccagaggaagatctgaagtcctgtggctgttgcacttggacaagcccacgcaggagggagtggtacccgctgagccaagccccctgctcctaagtgagctttccaggtgtcctgatttcctggggccactgtgatgaatgatcatgcgctgggtggcttaaacaacagaagtgtgttctttcacagtttgggaggccagaagtccaaatcaaggtaacagcaaggtgggttcctcctggagtctcccagggagaatgcatttcctgtctctccagctgctggcaatctttggcattccctggcagcatcactccattccctgcctctgtctttgcatgacgttctcctctgtgtcttccttgtgtctgtcccttaaaaggacactcatcattggatttagcacctgccctaatccaggatgatcgtcatcttgagatcctttacttaattacacctggaaaggttcttattccagataagatcacattgtgaggttccaggtggacgtatcttttatggaccaccatccaatccactacaccagggctcagcggtgggtaccctcccttctttctggcacagatgctggcatcactagcgtgggaaggcagatccatgaggtggggagagctggccagggatggtctcaggagtgtggaggggcctgggatggagaacctgagacccccctgcaacccagcttctggcagacacaccctcctggcctcctccccaaagacaaacactcggtgtaaagagacctgggttcaaggcctggcttcactccttgactcatgtgatctctggcaagcacgtgccctctctgggcagagatgattccccagctcctcacagccctggctctgggactctgagtgggagctgacagcaagagctgtgtgtctgcatctcagagcctggcaccctttacgtatcagagcacagaatgacactgaagaaaggagtgattgagcagtggctgggtgtgccttgggatgtgctgaactgggcatgtggtgggatctgggaagcccctgaattccccagatggtcatatccccactgcagaggtgatgttccctgctgatataccactggtggctcagggttgggccatgcatattctatcactggaggatcaggacatgaggaccagccggggtcaggagtctgcagctgtgcttaggcaggaaggtgaggagaggaccaatatttactcagctccatctcctttcagtctcataatgtgccaacaaaataggtcccattatatgcccagtctatagatgaagacacagaagctcggagaggccgagcaacttgcccgaggtcacatagttcttgaatagggcaggattccaacttggtcaattaggcttcagagttgctccctaacacatcatcttcacccctgaggccaggccagggctctcagtgcccagagtagaacaataaacacatcacacaggcttatcaaccacatcagggaccctgtcattctattctcaaaaaatatttttaaccatggttgcattagggttgtaagattttcagagctctttttctgtttttcaaatgtttgctaatgtgcttatatgatctttatcattaaaaaggtaaacattgaaaaaatcatctactaagtggcttctgtcaagagtgcagctagggtagttgtcattcggaggaggctattccagggacaaaccaacaatttaaaggttttctgctgggtgcagtggcttacacctgtaatcccagcactttgggagaccaaagcgggcagatcacgaggtcaggaacttgaaaccagcctggccaacatggtgaaaccccgtctctactaaaaatacaaaaatcagccaggcgtggtggtaggcgcctgtaatcccagctactcgggaggctgaggcaggagaattgcttgaacccgggaggcagaggttgcagtgagcagaaatcgtgccaatgcactccagcctggcgacagagcgagactctgtctcaataataataataataataacaacaataatgaattatccaagccctgtttcccttgtttctacccagatcaccaaaaagtgtatttctctgctttcacacagagctgtttttaccaaaccatgtcttaacactctgtccttggtttcggctggggatcagtagattaaatgtgcacgtgtagattgtctctttatttcccacaaaactgttctctcaaacaccgcctattgtgtccttcacatttcttgcaaagatccaattgacaaactcccgttagcttcatagccgggagaaatgctctcttgatcaatctgtaagctcccgaagagctcaaagatgtctgttttcacccctgctattttcacagcgcccaataaagtactaggcatttactctgtgctcaaatattgctttttgagtggaaaaaaaaggcgttgattgactcatacagctgagaagtccaaaggaatgtcttgcttgcttcagttacggctggatccaggggtccaaattgtatcttcaggaccctaccctccctcttttggttccgttttcttgtgttactggcttcattcttgggcaggctgactgcctgtagcagccaaaacagccactcacatttcccaaagttccttccacacaccggtttgcaagcctggagaaaagagggcaagcactcagttccccaaagttccagggaagatgcccatcagctggcttgggtctgtgtgcccatcgctgaaccaatcagggtgtctggggggaatgacgtaatttcattggccaggtctgggtcaagtcccactcttgaagccagggggcggagtcagctgcatcccactcaaggacacagcaaggatgggctctattatcagaagaggaggtagagaaaggcaggctgggcaggaagctagagcactgcagtttctgcaacatcccaacctggattcctgattttgccgccatattgataaacggtgcagccaccaactctcccgttcctacagccagaaaattattgattattctttgttctttctttttttcttttcttttcttccttccttccttctttctttctttctttctttctttctttctttctttctttctttctttctttccttccttccttccttccttccttccttccttccttccttccttccttccttctttctttctttctttctttctttctttctttctttcttttttttgtgagacagagtcttgctctgttgcccaggctggagtgcagtggcgtgatctcggctcactgcaacctctgcctcccgggttcaatctattcttctgcttcagcctcccaagtagctgggactacaggtgcgtcccaccatgcccggctaattttttgtatttttagtagagacggggtttcaccatgttaggatggtctcgatttcctgacctcgtgatccacccgcctcggcctcccaaagtgctaggattacaggctgagccaccgcgcccagccttctattaattaattaattaatttatttatttattttgagacggagtctcactctgtcacctgggctggaatgcagtggcgagatctcagctcgctgcaacctccacctcccaggttcaagctattctcctgcctcatcctcccgagtagctgggattacaggcgcctgccactatgcccagctaattttttgtatttttaggagagacagcgtttcactatgttggccaggctgatctcaaactcctgacctcgtgattcacctgcctcagcctcccaaagtgctgggattacaggcgtcagccaccacacctggccaattctttgttctttcctttcactcccttgcaggctggtagaaacttgaggcatgtggctactatgttcagccatcctgcagtccagccccagcctgggagctgctaccccccagcccacatccagctccgagaaccctggaactgagacggcattatacccattttatgggtaaatgtgccaaggccaagctgaactaatgatgtctttcctaagttcacacaggaagctggtggtagaatctgggcagagtctaggtctccaactacttggttcagaaatacacccactcatgccccactctgtatcctatggccctggtgcaccaacagaccatcagcaccaacaagccaagctcccccatccaaccacccacctccagcgcagccagaccccagggttcaaggcttgggggcactgggctccctcagcagatgcatgtgcagggggcaagcctcctgtgtgtagaaggaaactgtgacagcattgaggatatctctccttgggagttcctggcttctggatgcccacgcagctggcaggtgtgtctgagcatgcactagtctctctacaaagcaagaccccgcatgaccaaggcttggaggacctggagccgagaccggttgctgctggggacacatgtgtgtacccttgctcatggaattcctggcactgggacatcatagtctctgatacagaagaaaggaagtgctgtggctcagattccaactcagctcgcacagcgtgggacccccgaaaggcatctggacaagtgcaaggtgcagctccaggcagcgccccctggagttgtccatcccgccccggcatcttcatttatggtatcttgtttcttccttgctacagctcccagaggaaggcatatggtcatctgtgtcagtaggggcccccaggaagcaggtactgagatggggttggagatgcaacaggtttactaggggtaaagtctatggaagataacaggggaggaagtgattgggcagggagagccccagacactaatgaaagctcacaaagtttcagccaacctattggggagctccgcagtagaaagtgcccacaagaggagtccaggttaggcacaaatggccaggtcctgggccccctgccatgcacagtcgctggttgacgaatgcctgggaggagcctggcttcattcagctggaacgctccttgcacctcaacagcaattctagaagggaggcctgagcaccttcatggcagcctcatgatccatttcacagatgcagatgccagagtccagaaatgtcaatgaccctcccaaaggcacatggctggcacatggcagagccaggctggcatgggagcatctgatcccaatgccatgctcctgtcagccccagagtgactcttggctgctaagatgccctttgctactgctgggcaggactctgggacatgtttcccttccatcctccagggacagtgacaaggtggcctgacagagtgcccaggtccctgctgagccccggccaaagctcctgtccctgggaaacatgagtagggacagcccatgtcatgcttcagtctttccaaatctcaggaaactcttgggtagagaagccacttcaatgtggcagcttcaattctggcagggattcatcaaaagtccacagtgtttcccgcaccttccaggtcccctgtctgtctggggtcacccaggaccatctgtctgtcaccacagcggtgtggaatgctgaggatcacctctgtggtgacagacagatggccctgggtgaccccagacagtcgaaaggatgacttacaagtggcccaactggagagattcccatagggctggctgcagtggaaagttgctgccaaatgcccatctcgttccataaccctctcttggtgcagcagcagtgcatacaagtgtcccagagggacaatgacggctgcttcagcttgaatcacaagggaggaggtagggtgctggatacactcaattatcaccccaaaccctatcatcactcataatctgcctgagataaatcacaggcaggtaattattatgtcaggccaggtagcagagaggagttctaaaatagcagtcaaggaacttcctggttaattcaaatccatcctaactccctccaggggacaaaagtgctttggctgtagaattgaccaggcggagagaaatacgattgcttgatgcaaaatgggaactcctggacttaatgtttctctctgtcaagtttcagaatagcacacctgtcagaaaccctaaatcaatgatccaccatccggcgtaaatcatactgcagggatgtcctattttcttggtgtcaaaaccaacctccccagcctgctcgccagaccgtgtccacttctgctcagcccaggcctctggacccaattagtcctgcctgcttggcttcccacacctgtacttcttcccccatccaaatgccaccaaggcccagctcaagccacctggcccccaaaccttctatgcccaggcccatccctggatccagcttaagcgattccacttcctgtccccactgcaaaaggccaatgctgggtttatccatccctgaactggtcacaaccccagatctgtggctctcctagagctgggtctccctgttcttatccttttggcttctggagccagctcttctgctgggcaacagaaactgctttggattcacttaagccagaagagtggaggtgggtttactggaaagatgctgtttgtggggaggtttcttggagtgccaaggagcagaacacccgattcacccgggctgagtagacccctgtccagggcaggctggcctcaggtggggctggattcaggcacaatctctgggctctggctgactctgtggacgactttcctaggctcttcatggtggcagagtggttgcttacacctgtccaagtgcaggtccacttggacatggcagacgattactccaagttgctcagacaaaagccctgggctagggccaggtgcagtggcttagcctttaatcccagcactttgggaggccgaggtgggtggatcatctgaggtcaggagtttgggatcagcctggccaacatggtaaaacccgtttttactaaaaaaaaaacaaaaaacaaaaattagccaggcgtggtggcgggcgctgtagccccagctactcgggaagctgaggcagaagaatcgcttgaactcaggaggtggaggctgcagtgagctgagatcacaccattgcactccagcctgggtgacagagtgagactccatttcaaaaaaaaaaaaaaaagccctgggattagtcttcatgaggcctgactatgtgaccagaggcacatgcccacctcagggccaatcctggtggccacgggagagcagtgttctcatgggcagaggccctgggtcacaggctgctgcccaggtggacggggcagctccacctgcagctcatagactgagaacatgggagtagtgattcccacaggtcaatcagggcaccaacaagaaggaatggatggtgggcagctccagaccaacaaacaccgagaagttggctctctggaccagagagactgctgaacaaaatcagactggcctggaggctggagttttggggttttcctctccctgggactggccatgaataaggcactcaacttcaccacctctggttcctggaagagaaaatccacttggccagttctgaatcacaggtgctgcggccagggcctggccgagtcttgggtacatttccagagaaggcagaaagggctttgagagccaggagacatcctcccagcagctgctaaaatgtggatgtcgctactgtttttgtttttttttttagacggaatcttgctctatcacccaggctagagtgcagtggcgagatcttggctcactgcaacctccgtctcccaggttcgagctaccccagcctcccgaatagctgggattacaggcgcctgccactgcgcccagctaatttttgtatttttagaagagacggggtttcaccatcttggccaggctggtcttgaattcctgaccttgtgatccacccgcctcggcctcccaaagtgctgggattacaggcatgagccactgcaccctgccggatgttgctaccgttgcaacgcaagccaccttaactttttgtttaccccaaattagaaattaaacaattttattttcaatgtcaccagtatgtgatgcaatttcatgatgatggtttatctgagtagaaaattgcccttggtatctattctaccctcctctgctctggaggcctgggtatagctgaagccacagcagggatgggggcaggtagggagtgggagttggcgagttgcccattttctcccttccctggggtcaggaggaaaaaaaatgccattaattttgttgtgatgaaaaccccatctctactaaaaatacaaaaattagccaggtgtggtggcaggtgcctgtaatcccagttacttgggaggctgaggcaggagaatcgtttgaacccgggaggcagaagttgaaacagcgccactgccctccagcctgggcaacagagtgagactccatctcaaaaaaaaaaaaaaaaaaaaaaaaacccacagataaatttggagagaacttgaatctttacaatagcgagtcttctcatctgggaaaggcccatttctctctgatcctccaggatgttctcagctccagcccctctcccccaccatcccaggaatagcagtgaccttttgtacatatgccttagtccctcatcctccagatacatttaagcgctttgtctcaggcctccctgccaagcccacatctgccaccagcctcgtgtcctctcctccccagcctcaaatcctgcgctggctggatttaggaacttgggcggcatgttcctccacacctccaggctgcggttcaccggcacgctcctcctgtctcatccaccagggattcctatctgtcccttacattgtttccctctctgtagagccaagcgggaagggccatgttcacctttcagctcggtgccccacccccatcccccagttgctcactcacatgcacaagttcatcttgctgcaccaatgagtcttctcctccatgctcacccagtcttccttggatccccaggtgtcgtcctgggtgtgtccggtggtgggtgctcagtaaacgcttgctggatggaaggggagacagcaccactgtggggggcggggactgtgtttccaccagccctcggtaggatctttttttttttttttttgagacggagtctcgctttgtcacccatgctggagtgcaatggtacaatctcagctcactgcaacctccgccacccggctccaagcgattctcctgcctcagcctcccgagtagctgggactacaggcgcccaacaccactcccagctaatttttgtattttcagtagagatggggttttgccatgttggccaggctggtctcatactcctggcctcaggtgatctgcccgccttggcctcctaaagtgctgggattacaggcgtaagccaccatgcccagccctggattgagaatgttctaaagacaagagcttttgggaacgctgcagcaggagacttgcaggtgtgcagagggctcttgggggcctcatgagcagctggaggtgacccctctccccacatgtcttaaacaagggtacttggccaagacagtacaactggaaataaagacaacgaaaaacagtccaaagattagaaagcaagagacaatattatcattcttggcagagaatgtttatatttacccagaaagtccaagagaattcattgcaaaacagaactgctaagaaagcctggaaaagtggcctgataaagacccatagcttcctgcatgccagggacgagctgactggaaaataaagtggaaaaggcctcattcacagcatcaataaagtgataaatgacaccagcttaacatgaaataggccagacccatacaaagaaaaagagaaaaccataaaaagggcaaaaagacgtgcctcgttagagagaaatggttcttccccggatgggaaaacccgctagcgtgaagattcaagttctctccaactttacccgtgtttttattgcaattccaatgggaaaataattccaaaaacattttcactggtgtttgccagaaaaatgcttatgttcctcaaaaagaggaggtgcaggctgggcgcggtggctcacgtctgtaatcccagcactacaggaggctgaggcaggtggatcacttgaggccaggctggctagcctggcgaaaccctgtctctactaaaactataaaaattagctgggtgtgttggtgtgtgcctgcagttccagctattcaggagactaaggcaggagaattgcttgaacctgggaggcagaggtttcagtgagccgagatcatgccactgccctccagcccgggcagtagaggaggtgtggtagggctgaggcgcattgccatacccctgtgtgcatgcctgaagggacagggaggggacttcctctccagctgcctagaggaatattgcagccagctctcttagcaaagccacatggtcaccgtgagcttgggaagtgtgggggcacctcctatgtagtactggctctgagaggcttgggccttagtgctgttttcccctagtgggggtccctggacaaatgatgttgccagcagtgtgttccaaaaccaccacggtgggagggatgagcgtctcctgcaggtcatgacactccaggctggaaagcatcagagaacagagcatggctgtgggccctggggaaggggacctgtcttagtctgtgtgggctgctataacaaaatgccttaagctaggtggcttataaacaacagaaatttatttttcacagttctggaggctgggaagtccaagatcaaggcccaggcagattcggtgtctggtgagagcccgttttctggtagaaggtggtgccttatatggtggaaggggccagggagctctttggagcctcttttatatgggcactcatcccattcacctcccacaggcctcatttctaacaccattacattggtgattaggtttcaacatatgaatttggaggggagtgactgaacatccagaccacagcacgatctaattggctgagcccaactcacaaactagacttgcgagatggctgtctgccgaggtctccttggccctgaccgggcagagggggctcagtagggctcttgagggtctcagcattgtgaagagcttggggcagaagggtagggcaagacaggaggatggtgagggcctggctgttggccacagagtgacctctgtccccaccctctcccggggcttcctagggctgggaggcagagcctggagtcttctctggtctgcagctcctttgttgtgtgacctgaactatgcttctgcttggtgtctcagtttccccattggtaactggggcgttgactggatttcagggctcaactgggctccctttctcggcaggtggaaattgccatcttataaaggggaacctggatgctgctggctgggagcactgggtggaccaggccacagccgaaggcccaggagaggtggagagaggctccatcctgagtggggctcttctaggccctagagtctcaggccactcatgccactacagagggagagacaggggctacatagggagggtgtggaccaatgaggggttcagggttcccaatcccacatcacgccttcccgtgaacctggagatctctcctgtcccaacaggcctggaaccagctgttggcatcaaggccttgcacgcatgacccagacagcttcccctctccctccttccagcctgctgcttccatactagattcggggccattttgccgcaggattcatcggagggccgagagggagctgccggcttttccacctccgagccgaggttactctcagattcatgggaagccataaacccgcgccctatttctgctctaattgaagcgatttgtattgtgactaaaataatcagagacaattttattggtatatttttaaaaataattacagcccatatatttatgttatataactgcagtgacaatttgattgggttccccagggccccaacttgaagagcctgtgtgggagtggccccatccctgccttcagcaccctccacctcccccaaatctcgggcagaggtgatgttgacagatgcagtccccaaggcctgaggctcggtcagggacttttcagtgggcatgtcttaaaaattttgggacagccatgccagcccagcgaccccaaagcgccgtagggaggttgggaagagatggaggggggctctggagtctggctcagctctggcctttgtggtgggtgtctgtgccctgccatccagcatgcagtcactgaccttcttctgttcttctctggggacctcctgcctttgtcctcctgcttctgaacagctgactgtcccaaaaactctggggttgaccaatcagagcatcacattctccagccatggtgattggttcagggctaagcacatgacccaatcagagccaatgacattgcacatgccccagatggactcccgaacggttggggatcccgagccgcaggctgccatcttgccccatgtgggcactggagaatggggctagtgtagagaagaccctagaagagagatgtggatgggacagggtccttgtggcatcatttgagattctgaacctggagctggggctgctcccagagtttttggatatatgagccaatacatcccattttggcttaaacctgctgtagctgtaggactgtgaccaagagttctatttctatgagtcccgcaggcttgtttccccacctctaaagggagagagtaatcactcccgtggtctgttatgcctcgtcattatctgtgtatagtagagatatcttggtgtatagcaccaagcacaggacttggacagagttaaccactcaataaacagcagccatggccgtcgtcaggagcattgtggagcactggatgctgtcgctggtataaggtgtgggcagaggagacagggagaggttaccaggcaatgtcccagcccagaaggaggccctgcccccacatgcttataggtggcagaagcacggttcctgctggctcagcaatgcctccttgccttcttccatcagggcccctcctgctcagccagggtcccgtactgtgcccaaaccagttctgcattgttcctccccaaatagctcaggctggaaggaaggagctagggaagtgaggaggggctagggagggggaagagcagcggccatagctccagcacagtaggatctgactatgggcgggagagcctcgatcgcggggtgctctggtgcccaacttggctccttcctcttagcgatcgccccagctctttgctgagctgttggatgcctcagtgttcccaggcaaatccccctggggccctacctttggagctgagctgtgtctggcctgcacatccaccagcaccacaccaacaccgggcactgaagaccaaaagcggatccaaactcccacccgctctgagcaggttttctctcctacggcagccttcacccggaagccacagctgttaaagctgctagcgggtggtgagggccttgtggttctgcacccaagaaagccttctcttcactggcttcaaaccatcttagtcttagatagcagcacgggcctcagggatagcccccaggtctaccttgtgggaatgacaccttccactcctggaggcttgtcccatgagtccactaatagggaaagggctgaaaagagcgctggggctgaaacattcagctggctgttgggtccccaggccctcctgactgcacagtttagtggagacgtgcaaactcgcccagttgcacacactcacatgtacacatatgcacacgcacacacacacgcacactttcacatgggcatgccacacatacacacatatgtgcgtgctcatacccacgcacactctcacatgggcttgtcacacatacacacatgtgcgtgctcacatccacacacactctcacatgtgcacaattgcacacatgcacactctcacaggggcatgttcacacccacgcacactctcacatatgcataattgctcacatcggcatggtcatacacatgcatactcacattgtgtacacttacacacacacacacacacactcctacacatgtccacactctcatgcatgctctcacatgaaccaaaatacttgcctcttctgcctatagcagagcagaggtgcgtccgtcgatgccccatggtgtttctcaggatccacgcatcccatgtactgagtgttgttagccgggagattgcctgctcctgtgtggctgcgctctcaccagtcctgaaggtccttataaacattggtgccacccatcttgtaggacattctctgcccggccccaggagcctcagcagaggtcccctgatttcaaacattcttttctgtcattagagcttatgttccacagatgactttgaaaatcttgccaccttcacaggcccagacatgacggtgcagaggacatcaggaccagcaggacataaaaccctcacggtcacagggagaaagtcagatcccgggcacctgacacagccaagccctgctctcaacatgtgtatgacaatgggtgtgatagaggtgccccctgcctctgggtctgggttacatgcccccttctttgagtcctagagggaacagcctgatagtgggcacaccccttcctctccctgaaatgacctggcagacccccttcccccagtgatggccttagggattcccagccatcacccctccctccaggaacccctcatcccatccttccatagggccaccacacagacaggccctctcgacctttcccaccatgctctgcacaactaggatgggcagtgccccacccaaagcactgcatgccccgctccccattgtcacagtaggtacaggacatgggtctattagatcttagacactacagtccgtacatgccaatccattcccagaagacctcccctccccaccccagtgtcactgagccacttcctccagcacagccccacggagggaggcccttttgtgtcttgcccatcacctggctggccagatctgctcagctcttccctgactcaagaaaaacaagagagcttcattagtccgttttcatgctgctattaaaaactgcctgagactgggtaatttataaaggaaagaggtttaatgactcacagttcagcatggttagggaggcctcaggaaacttacaatcatggcagaaggcaaaggggaagcaagacacctccttcacaaggcagcaggaagaagtgcagagcccaagaggaagagcgccttataaaaccatcaggtctcgtgagaactcactcactatcacgagaacagcatggggaagctgccctcatgattcaattacctccacctggtctctcctgtgacacatggggatataaggattataattcaagatgagacttgggtggggacacaaatcctaaccatatcaagtgctctgtggtcccagataagccaagaaaccttcgtggaggaggccacccccacccttggcctccagacccagtgggatgcctaggtaaggatggaagtgtcccttaagagggctggcatggatgtcacatgttccatggcacaccttgagggtaggcagccttgagcagtgggcggggagctgggcctgcagggacacagagccctgaggtcttgtccttggacccctgatctgggatcctcaggggctctgggagaaagcccctgtcccctgctggtgctggtggtgtggtacagataacctggaaaccctaaaagaagcagggatggagggaaggttgctgagaggtggtcagagaagctgttatgcagactgggggccagggaggtacaaggggagtccagatgggggctgtgggagggacagacagacagcagactgggtcacccccaggctccccttctgggccccccaggaaacgaataggtccagcccaaaaggggctctgggaagactgctcccagcacctctgtgctgccagccctaaaggcacccacccgacccccacacacgctgaatctccactccttgtttgcaggaggaaactgaggcccaggagcctggagatgtgtctgctccaggtcacactgtgggctgtaggggtccggaacccagacatgtggactgcgccaggctctagccaatgactcctccaaaccactgcacctccccagccctccagagttctcatctgaaaaacggggcatcaggtctgaaggtcttcaatgccccttctggctgggatatcagagttttgggacctctctctccaggtcctcatgagtccagcaggagctctggcaggtccagggtcccctccttccctctgctgccactgctcagcacccaaccctttttaaaattagctctgtgagttacagaagtaatccctgctttcttgttaacatgtttcaaacagcacagaagggttcaaggtggaagctgaaggtactccccagtctcccccacaacccccagcccacctctgctaggtcccacatggcctttgggaaacatatgcattgttccctcttcccatagaagccagaagggaagtctggaatcagtgagccaggtacagctctgggcccaggcccagagatcccacactcatgccagcccctacccacgccagccccctccctgtgccagccaccgcccctccatctatgcaggccccctaccaccaagcccatcgataggggctcattattccgtcctgtctccctaggatggggcagagtgacagctgttccgtgtttaattaccgatgggctgaggctatgccaacccatgaataaaattacagttgttctgcaatgcaaatattgcgggcctccgtctgagggtgcgtgcggggctgatcttcattggctgacttttttaatgaaaaaagttttattacattttaaagaacattcataatgatgaaattcacacacctcaagatttatacagcactgcaaacaagtggcaggagaaagggagttatttataacttcaaataggcttctatcctctggttgcattgttgtagggtgcagagcatttttagctgataattgctttaatggtaaatgagaaacttagaaccaaatatcggaagtgcctaaacaaggagaagcctcagctaagatgggggcgagttgaccttatgggtggggagggagaaaagggagctcgctctcgccaaggctcatggggtaagaacacatggcagacgttcagcactggcagaggtttgccatctgcgggtgcccactgggcacaggttcagcttatggagaatgaacttggagacatgacatcctcctgtcggagccgcaaccgcagggctttctcctcccatggtcgctgtgggatttcgttctgtgtggtgtatccatgctttgtgtgactggaaatctcatctgagcacagctggataggtgataatgcaaactttcgattccatcatctaaatccataccgataggaatacagaacatctgatttgatttccccttgtactaagaaaacggagcttcccagggaaggtgggcatttcctgctgaatgggactggaggtggcatttcctttgctaagccttccctgcagatccttccctctggggacgcagctgagctcaagaacagtatagctgagagaagcttctccagctggccctggtccccatctctaaacagaacagaacctgcttcaacttagcaccgtcaacacattcattcgttcattcattttgccgacatgtgtttgttgaaagcttactacaagccaggctcctggcacgttcggatgaggaggatgtagtctgtggcctccaaaagcaactgaacaggcaagacctatacgcagagacaactgagcctcactaaacatcagtgtgacaaggacagtaatggaggtataaatgcccagggacagggacagcagagaagagggcctggctgtgtctgggggtggagaggtcagagaaggggccatgcaagccagccttgaaggatgtagaggagtttggagtgggcacatgcttggcagggcagcagagtgaccatcaaaggcaccctccagcttgaggtctgtgggagggagggggactttgagtgtctggagcacggggtggcgtctatgttggggtgcaattgggatgtggtggagtgtcaggcggaggagcctgaccttcttcctggggcatctctgctgcttggagctggggttcaggggctctggaggccgcacggaatgcttatagatggtgggggcagggagggcgtttgggatagggattgggccagccagtaggcacatgagacagttagaaggagaaatcagtgactcctgcttcccttctcttggaggtcagccaagcctgggtgtctcctgttcattcagcaaaatacctcatcccggaacaagcgtgcaaaaggagacagggcaggattccaaaccagctgcaaggctccctctcggtgtccttccccacttcggcatgtctgtgcgtgcatgctggcttctgtgcatgcatgctggcttctgtgcatgggtttacatgtatgtatgtctctgtatatgtttgtgtgtgtgtacttagtgtgcgctttcatgtgtgttcatgcctgtgcgtgcatgctggcttctgtgcatggatttacatgtgtgtatatctctgtatatgtttgtgtacttcagtgtgtgtgtgcctgtgcatgcttgtgtctgtgctgagtgtacatgtgtctgtttatgtttgtgtatgtgcagatatgtgtgatgtgctcatatctgtgtgagcgtgtgtacatgtccatgtatgtatgtcaagcacaagggtgtgtgcttgtgtgaatgtgcactgatgtatgtgtttaaggatttgtgtgtgtttgtgtttatggatgtttgtgtgtgtgtgagggtgcatgcttattaggggatctgtgcctagaccagatacctgggttttttttgttttattgttttgtttttgagatacagtctcactattgtcacccaggctggagttcaatggtgcaatcatggctcactgcagtctctaactcctgggctcaagcgatcctcccacctcagcctcctgagtagctgagactacagacgtgaactaccatatctggctaatttttaaacttttcatagagaaaggggtctcattatgttgcccaggctggtctcaaactcctggcctcaagcaatcctcccacctcggcctcccaaagtgctggaattacatacaggagtgagccactgcacccagcccagacactgagatttttaaaattagtctgacactctggaacccacacagcctgacaccaccactggagattctaaagtgaatcccgtacaagccacgcacacagcccctgcccttgggtggctcgggtccctgaggtctccttggtgaggggaagaaaacggaagcctaaataacagcagctgccttatggagcagcccaggccaggctcagggggtgtgggggtaagaggatgtctaaggacagccaggctggtcctctgctcacccggagccagaagtgaggtagtgccagccaggcccggggcagcctcaggggccccgaagatgggaagggtgcccagatgcccgtggtatctgggagtgcacatgagtgtgtgtgtacatatatgtgagtgtgcaggtgtgtatatctgtgtcagtgtgaataaacacatctgtgtgtgtatttgtgtgcagataggtatgttggtgtctgtatatgtgcacatgtgactgtgtttcctgacccaggaacaactatctcttgaccaaagttaaccaaagtctcatagaagaggtggggatggggcagggaggacaaggcagacatcccactcctgtccttccccacagtagccctctgacctgccagcgtcagagccattaggaaacaagccatcctaatggctcgagacagtggccagtgggcatcgcgtatactccagggcactctgtgggacgggagttcattgttggcactggaggcctgttttattttttcttttcttttttttttttgaaacagggtctcgctatgttgcccaagctggggtgctgtggcacgatcatggctcactgcagtcttgacctcccaggctgaagaaatcctcccaccttagcctccctggtacctgggactacaggtgcacgtgccaccatgcccagctaatttttatatttttttaagagatggggttttgccatgttgcccaagctagtcttcggcttctgggctcaagcaatccaactgtctcagcctcccaaagtgcagagattacaagtgtgagctgccaagtccagccctgttcccttcttaatggcttacttggggtttcaatgatgacagggtcattactgggtttcaggaaccttccttaagcagctgaaagaatccgttgagctctgcttcctcttccctcttccaggctgaaggagctggaggggcctggggcctcctttggggaggccaggaggatttggtgattaagtgaatggaatatgcccattgtggtaaaaatagcagagctgcggttggtggaggcacagaagcccggccgaagggaccaaggggtgttcgggagggaggaagtccagttctgatgatttattaaggtgtacaaaagaaccttcagaacaaagacccagagatgcaggaaatgttgtccatttttctgcttaggttcaacgacatatggacagccatgtcgaaacagattggacaataagggctgatagactgaatggcaaaacccagccaggcctgtctatctagattcttcttggcctctctaagcagcgttcctttcttctgggtaggcggcaaggccccttctggaatggcgggggtgggggggggggtctcgtgacttacagtcaaacaaggtaggtcagagattgtgcaggtttgttacacaggtatacatgtgccatggtggtttgctgcacttatcaacctgtcatctaggttttaagccctgcttgcattaggtatttgtcctaatgctctctccctccccttgccccccaacccctagacaggacctggtgtgtgttgttcccctccctgtgtctatgtgttctcgttgtgcagctcccacttacgagtgagaacatgcggtgtttggttttctgttcctgtgttagtttgctgaggatgatggtttccagcttcatccatgtccctgcaaaggacataaactcattcttttttatggctgcatcgtattccatggtgtatatgtgccacattttctttatccagcctatcattgatgggcatttgggttggttccacgtctttgctattgtaaatagtgctgcaaaaaacatatgttgtgcatatgtctttataatagaatgatttataatcctttggatatatacccattaatggaattgctggatcaaatggtatttctggttctagatccttgagaaattgtcacactgtcttccactatggttgaactaatttacactcccaccgacaatgtaaaagcattcctgtttctccacagtctcaccagaatctattgtttcctgactttttaataatcaccattctgactggcggttttgatttgcatctctgtaatgatcggctaacaaacatatgaaaaaaagctcatgatcactgatcattagagaatttctttatggccagtttttacacagaaaggcagagggaaagttagagttatatttttaggttttatggctggctttgggggaagagcttcagattctatgaccagccttggggaagagggattctagtttttatggttagcctcaggcaagaatgggactgagagacaggagggcaggagaaggtcagagaaaaacttttgttttggaggctgtttctggggccctcattttggaccgcagcaatagctgggccagagggagagtggcgggggctcagtggtcggactcagagctggcttgtccacctgcagagctcttctccccatagatgccccctacccaggagggcgttgtgagtccatttcacaggccaggaaactgaaactcagagaggttgtgcagctgcctgtggccactcagcaggcaaagccagagctgttgcttgcaccaaggccacctaagcccaaggtgccgcctgccccatgcagctctcctctcctgccactcagcagggaactccagagtccagagatggggaccatccctggggcaggcactgggcagccgcgatgctggaaaatgctcaaggtttcctttcatcacagcccaggccacagcgcctcatttgccaactgtgttctgagaaaacagcaacgatagaaaggcaccagtgaggaggcggctggagctctgggctgtgaggctgcgtttcaggattgagaggctgcgctgggaagaagggcctgccttgggggctgaaggcaaatcctaactcctactgcatgtgatataaagggttacaaaattaagtataaatgcatctctctaaagtcacttttctttctgtgtgtgtatatacgaatatttgtatttatttattattcctaaaaaataattgtatttactgttgtttattgtgttgtatttattattccttgcgttttattgtattgcattttattatttatctattgtgtttattatctattgtatttattattgtatctattatatttattattcctgaaagtttgtacttattatttatatattgtatttattgtttattattgtatttagtatttattattgcattatatttattattatttattgtatttattatttctaaagagtttttaggaaactctgtatttattattcctaagataaagtttattgtatttattattcctaaatatttatacatttataatatttatatattatatattcacatatttgtaatatttatgttagttacattacatataatatttatattatatattacgtatgtataatatgtatattatatatttacatatttataatatgtatattatatatttacatatttatacaatttatatattatgtatttatatattgtatatttatatatttataatatgtaaatatttttatattatatttaggaacaataacattgcacttattattcctgaaaaagtctggggcaagattaatttgataggataaacacaagtactacaatgctgtttttttggcaccccagaactggtaggctgatccaccaatattctttagtcaaagttcttagggccttgaactggaggtaagaggataagcccaaccttaagtctcttgtattttagagcttgccatatatattgctgtgaatacgcaatatgatttaaccatagcatagcaatttaaccaaggaggttgagttgtagcaggaataagagtaataacttttgggccaagcacggtggttcacgcctgtaatcccagcactttgggaggccaaggcgggcagatcacgaggtcaggagttcgagaacagcctggccaacatggcaaaaccccatctctactaaacatacaaaaattcgccgggtatggtggtgggtgtctataatcccagctactcaggaggctgaggcaagagaatcgcttgaaccctggaggcggaggttgcggtgagccgagattgtaccattgcactctagcctgggtgacaagagcaagactgtctcaaaaagaaagaaaggaaaaaaaaaaagaataataacttttggtagagtaaataatgcctaaacctcacttattgatctcctccatgggtcaggcaccccaaggccctcacaagtcttggttgtcttaattaatttaagccacagaacttgaggttggccctgtgatcttctccatgtttagaagaagcagctgagctttctctccaaattccctagagacatgccatcacccttacatgcatacgaaatacttttgtcccttatgaaaatttcactaggaaaaattactcactacgttccttagtcatagatgtgtatgtaaaatgcatttgcggggccagtggtaactgacatagcctgtaacttaccaggtgtgagatgtataaatgaagatggccattgtctgaagtgagaagaatgggataaaaaaaagaaaacaaaaatcggagaagtcctactgaaactcagtgaaagcgtcagctacattttgcaaacttcaaggagtttctgtcaggtgctaggctgctgagaccagagtgaatttttggcttaaagcagacatacagccctctctccaggggaggcagcatggtgtgggaaagaaagtcaaggacacgctagtggaaagtcatgtcctcctctccagggtgagcatgcaggggcggcagccgttggggagatggggccagtgcctgccttgtcttaagggcctgcagacaccccagcttcagatacatgggcacagtcttggctgcacctagaagccctgggatgctgacgtgagcatttcctgggatggaggaactccttcttgaaccccctcaaacttgcagaggtgggctagacatgagtaggctgctcatgagcaccttttgtgtccgggaaccagcagtcatgaggatgctttgttgaccgtgaagacccagtgtttccagcaggcagaattctgtggcctggcctcttctccaatggccccttcaccactgtagtgagctccatctgcccttggggcccccttcctgaacaagagagatgcagctcactcacacagtgggatggggatgccctcaacttgacaggcaaaagcctgggcatgagagtgagctcagctatccagccccctgaagaaaagacagatggagcagaaaaccgtattgtcatgatatcaaggaaagagaaaaaacagaattctaaaaatatttactccaggaaacagatgtaaggttttctttccaaaatgaaaacattgaatctgcaaaccaaatggggaagagaggatgaggacaagctgtggtggaaatggagctggtagtcaggtaaagcatccaaggacacaaacatcacagcaaaatcgcagaagggtcagcgacagggagaatctgtgagaaccctgcagacagtggactcggtgacatggagcataggtttgagaggctttttcagagtgcaccaaaaacaaaacaaaacaaaacaaaacaaacgaacaaaaaaaggaccagagaagttagaagcaataatcggcagagcagcggctttgaagaaaagagattggaaatccaatcaggaggatgggtgttaatgaagaaagaacatgactaacaaggaagaaaaaatattcaaaaataaaagaggaaaacctggctgaactgaagacagatctaaatctgcaggttgaaagggtttgctagagaccaggcaaaactagtaaacatcaaaagatagtggtgacacactaatcgcttggattcatgaggaatgaatacctacaaagacataaacagcaggctgccttggttctctccctgcactccttaccgcctgccctccttggagtagggcctcaccctgccttctcagcatctcttttctttcctttccttttcttttttccttccttccttccttccttccttccttccttccttcctccctccctccctccctcccttccttccttccttcctccctccctccctcccttccttcctttcttccttccttcctctcccccctttctctctctctctttctctctctctcccttcttttctgacagagtcttgctctatcgcccaggctggagagcagtggtgcagtctcggctcactgtgcaacctctgcctcccaggttcaagtgatgctcctgcctcagcctcccgagtatctgggattacgggtgcctgccaccacacctggctaatttttgtatttttagtagagatggggttttgccatgttggccaggctggtctgaactcctgacctcaggtgatctgcccgcttggcctcccaaagtgctgggattacaggcgtgagccactgcgcctggcctctcagcatctatttctctgccttcttgatcacccctccctgcgcctcagtccatcatgggggaatcccaggtgagatgcacttgtactcctagcgttacaggaaagggatcccaatccagaccccaggagagggttcttggatctcgctcaagaaataattcaggacaagtctgtagagtaaagtgaaagcaagtttattaagaaagtaaaggaataaggaatggctactccatagacagagcagccccgagggcagctggttgcccattgtcatggttatttcctgatgttacgctaaacaaaggtggattcatgcctcccctttttagaccataaagggtaacttcctgatgttgccatggcatttgtaaactgtcatggcgctggtgggagtgtagcagtgaggacgaccagaggtcactctcgcctccatcttgattttggtgggttttggcccacttctttactggaaactgttttatcagcaaggtctttatgacctgtattttgtgctgacctcctatctcatcctgtgacttaaaatgccttaactgtttggcaatgcagcccagtagttctcagcctcattttacccagctcctattcaagatggagttgctcttgttcacacgcctctgacactagtcgtctcactgcagagctgctgagctgccttggatactgggctaatcttcagagaccagaagctggcaaggctcacaatatgagccttggctgctcacaccttcccccaagggaatccctatgtgcagatggggtttggataggcagaggggagagacccctccttctgcaaattcaggccaaagatgggtcaagccctgaagagcagaagccacataacttttgggccacactgtagacccagtgggtgaactgcttttctcagccagcaggtccactggggctcacccaggctaagctagatgccccctggcaaggttgccaactccctgacctctacctaacgacccagggaggggaatggcttgccagcccatcactcctgcagcaactgtggtgggaaggatgagaaacgtaattaaaatctcaggcatcttttcccaagggtcattccagctgaagagcctaaatatcataagggtatgaatgagctgcatttattattttcaccatggagacgtccaagaaaactgaccttttcagcttcaataaaaacggattttcctgcagatactttgacaacagctgtgatcatgagcttggctgaaacttaatattaaacaccaaagaccaggaaaaagagatgccttcccaaggcctgggagagttactgacacccgcttgcaattagacactggtatgggcatggcagcctgagcccagctcacagaggctcactcactcctctctggatccagatggctgaggaacccactcagcatcaaagccacctattatttacgcgtttagtttaaggcatgtagcacgggactcagagcaaagctgcagtagcagactgccctggaattcagcaggactaggttccggtctgcttggattcagcatcccctcctgtcatgtgaccaggagccccagacatcacactctggctcgtcttcccctaaacacagcccagagctgaccctcctgccatgacttggccatactagttggcaaaaagcttgccaacttcctgccccaccatttctactgaccatggtagccaatacccagaggaacagatgacagtcaatggcagctgctgccttgcactgaaatcaggtgttggacagtaacaaaaccttgagttccctctaaacacctgtgcctgaccccaggcattttgtcctccctgtcccaaccctgctgaaaccacctttgccaaaattatgactgagaaaattattacagtaaaagagatctgactgaaccaactccgtcttgctcctaacctccaagttgtccttgttcattcctgggcataggccgaactaactttgggaggaacttggtttacagtttaattttgaaacaaagatgataacagccttttcccaaaacaaacccccttcttgcttggggactagactgcctttgcaggactaaaaaattagccacataagattagaaattatggtgtaggagtcactgttgcaaaatctgagattggtgcttttgcagatcttctgctccagtgcaccagctgatgccacccaaatcgataaactggctcatctggtcttggggccccccacccaggagctgactcagtgcaagaggacagcctcacctcccgatgatttcatcttcaacccaaccaatcagcacttaccactttccaaccttctacccaccaagttacccttaaaaacccttgtcccccaatttctgaggagattgatttgagtaacaactctgtctcctgtgtggcgtggctggcctcttgtcagttaaactctttctttactgcaatgctgtggtctttatttgtgcagtgggcatgaagaatctctcaggtgggtacactgccaccatgaaagtgaagcaatttaaaaaggtataaaacaataaggacaaaggcaaatgaggagagagtagcaacgagagatttcaatgaatttcagaaggcagaacttggaggaaggcaatcttactaggcagagcagagaaagcacctgaggtgctttagaggagactggtgagcatgagcctgtcagagatgtttgaaccacagcaactccatcttgaatagaggctggataaaatgaggctgagacctactgggctgcattcccagattgttaaggcattctaagtcacaggatgaaataggaggtcagcacaagatacaggttataaagaccttgctgacaaaacaggttgcagtgaagaaacccaccaaaaccaagatggagacgagagtgacctctggttgtccccactgctacaatcccacaagcagcatgacagtttacaaatgccatggcaacgtctggaagttaccctctatggtccagaaaggggaggcatgaataatccacccctcgttcagcatatcatcaggaaataaccataaaaatgggcaaccagcagcccttggggctgctctatctatggagtagccattcttttattcctttactttcttaataaacttgctttcactttacagactcatcctgagttctttcttgcacaagatccaagaatcccccctctcttggagtctgaatccaaacccctttcctgtaacatgcccattaacacagaacctcaggcaagtggtggggatggattccggaagctgggactgggaatgagagtttaggaggattaaaaacaagggagttggatgacgtcacagaagagtgcagttagaagctgcaggaatctttccctccaccctaacaagttttgatctggcaagggctgtctaaagcaactattttggaactctgcagtctagttgaacacgttcggcatccaagagaaaacttaatggagaagctggtgaattttaatacatttccatgtttgcgtactggctaccatcccccacctgccagccccgtggcaaacagctgtggggacagtggcctgcattcctggtgtgacttgctggtgccagggtggggaataagaaccttatcctccaaaaattagagttgtgtgttttgattgctgatccttttgacctctgggggactggcacagagtccagccattgtttcagatcacaagagctagagcagcttttctgctgtgaggggatttaaagagacatgacttccctgttccctcccctcacctcaacaattttgggagccaaacatttaaggaaatctttgtcaggtcattgactgacagagacaacggaacaggaacttcaaggaccacatgcaataagcaatcacaatttgtaaaaataatctggaaaaaaatcacagatggatggctccatccttaacaagcaaaaatccacaatccttgaggagtgtgagagttagagttccaggattaccacaataataatcagaatgcccagtactcaacaaaaaaagtacaaaacatacaaggaaataggaaagtatgacctgttcacaggaaaagaacatttgacagaaaccatccccgaagaagaccagacataggaattactagtcaaagacattaaatcaattatcttagacacatttaatgagctaaaagaaaccatggattaaaaaaccaaaggaaattgagaaaataatgtctaaaaaatgagaatatcaataatgagaaattataagaaaggaaccaaactggtcttggaactgaaaaatacaataacttaaaatgaaaaacttactggaagcattctacagcagatttgagtaggcagaagaaaggatcggcaaacatgaagataagacaattgaaagtatccagtctgaggaacataaataaaaatgaatgaaggaaaataaatagagcctgaaggatttatgggatgtcatcaactataactatgcattataggaattacagaagaaggaagagaaaggggcagaaaaacatatttaaagaaattgtggctaaaggcttcccaaatctgatgaaagatatgatatagatactcaagaagctcaacaaactccaaacaggataaactcaagagatccatactgagacatattatactcaaattgccgaaaccaaagcaaagagagaattttgaaagcaacaagggagaagcaattcatcacgtacaaggtatcatcaaaaacttaatagctgatttctctttagaaaccctgaaggctaaaaggcagtggggtcacatatgaaagtcctggaaaaaaaactcaatcaaaaattcaacatctggcaaaactattttttaagaatgagggagaaattaagacatttcaagaaaaacaaaagctgagggagatcattacaaatagacctgccctagaaatgctaacaggctggatacacacacacacacacacacacacacacacacacacacaagacagtaacttgaagctgtaagatgaaataacactaacactggtaaaggtaactacatagataaatataaaagccaatattatttttccttggtttgtaacttcctttggtttggattggttttggtttatacttttggtttggtttgtaacttctccctttttcctacctgatttaagaaactaatgtatacaacaataattgtaagtctatgttaatgggcacataaggtataaaatgtaatctgtgacaataataatgtaaagaggagggatgaagatgtataggaacagagtatttatattctattgaaactattatccaaatttaattgttataagtttaagatgttatttgtaatctccaaggtaaccactaagagaataacctaaacacatatagaaaaggaaagaaaaatggaatcaaaatgatacactacaaaacaaatcaactaaatttttaaaaaggcagcaatgggggaattatacaacaaaaatcatgtaagacatacagaaaacaaatagctaaatggcagaagtaaatccttctttatctagaatatataaaaactcctgcaaatggacaatacaacaacgaaaatccccaaacaactcaattttaaaaatgggcaaagaatttgaatagaagtctctccaaaaaagatatacaaatagccaatacaagatgattggctaatatcattagttatatggttcagcgtccaagagtccaatatgctcaatatcattagtcattggagaaacgcaaatcaagaccacaatgagatatcacctaacaccaattagaatagctataatttacaaaaaagaaaaaaaagtttaaaagcacaccagaaaataacaagtgttgatgaggatgtagagaaattgaaaaacttgtgcatggctagtgggaatgtaaaatggtgatgccccagtggaaaacagtttggtggctcttcaaaaagttgaacatagaattattatgtgatccagcaattctgttcctaggtatatatccaagatattgaaaaacagggatgaaaatagatacttgtacacccataagcagagtgtcactggtgaagggtgttcaggttcttggcattttgaacaaagaattggacaaaatgcagaaacaaagcaaggaaagaatgaagcaatgaaagcagagatttattgaaataaaagtacactccatagagtgggagcaggcttgagcaagcagttcaagagcccccttgcagaattttctggggtttaaataccctctagagattttttttattggttacttggtttacaccctatgtaaataaagtagtggtttgcaaccagtctaattggttgcagaaggtggccaaccagaagccgaagtgaagttacaaagttacagatgaagacttggtctgtgaccagtctgattggttgcaagaggggaccaatcagaggtactttcgtctttcatctgcaatgcagaaaaggggttgggagttgcaaagggagtagccactgatccttttgttacttaaaggtagggttttcctcttgattcagttctaggaagtcagcatggatcagcctaaggttctctgcctccagactctattctcctgcctcaatagctgcatttttcaaaatagccaaaaaggtgtaaacaacccaagtgtccattaatggatgaatacattttaaaaaatgtgagatatatatatacctgcaatggagtgttattcagccccaagatgtactgaaattctgacccatgctacaacatggaaaaaccttgaaaacactatgctaaggaaaagaagccagacataaaagggaaaacattgtataattccacttgtatgaagtatctagaatggccaaataaatacagacagaaagtagaatagaggttcccaggggctggggcaggaaggtatggggtgttatttcttaataggtacagagtttctgttttggatgatgaaaaatttctggaagtagatagtggtaatggttacaaaacattgtgaatgtacatactgccactgaattgtacacctaaaaagggttaaaattggcaaattttatgttacatatattttaccaaaaaatttcaaaaccagaggaattggtgaaaaagctgtaaattgagcttctgaaatgccagagtctctctccttgctcaatatccaggagatgagaggctggagtttcattttattaggaaattgaaccaaggagttgaattttagggcatcaggcataagagatgtctggggaacagtgtggattgctaggcctccttcactcaccagatatggcatttccccagtcacataccacccacccaccaccaccaacccccacacacaccacagcacattccacacaccatgcaaacacactccatgttcctggctagaatatcagcaggttctttctggaataactgggctgtcactgagagaagaaccccacacattgcatatgtagtctgtccagtaaaaagaccagcctgttgcttgctcagcctcccaggagtcccgaaagagaagaaatgtagaaggctcagtctgcctggtcaacagcagtccacaaaagacaacagaaaaaacaaatgggaggaaattgtaaaaatactataaggcagtttcccatggttgagggacataattctcttcagttaaaaagcccaccaattgtccagcacaagaaatgaagtaagtttacttcagggttcatcaaggtcaatttttaagtgacagagataggaagaactaaatgttttcaatgagaaaaaaagtatagagcctgtgatgtgcccctctgataccccttcaggaaaacatgtgttgtcccagatgtcagcaggtggcttccagatctcagcccttcaggggtctctacgtgttacagagaggcacctcgccccaggtcatgcctaggtgatccatatccgatggctgttagatgttggagcataaaagtgaggatatctttgttcagttcaggaccctctgaaaagttattcctgctccagagctcccctggggtcaaggaaggctatctcaagcctgaagtgcagtacaacttctccttctgcctaaacctgcctcctttctctctcttttataaatgttaaccacaggagaatctttagtaaacatcctgcatgctaagtctgcttccaagggagcccagcctgcaacagatgtcatacacagaactgggaattagaatggcatctgactcctcaacaacaacactaaaaactagaacacaatggagcaatgcttttaaaattctgagggaaaaatattttcaagctaaaattctatacccagctaaactatcaatcaagaatcagcgcagaataaaggcattttcagaccttcaagtactaaaaatatttactttccaaatccatttcttagggagctgaagaacagggatctgaagaacaagctccaggaaaatgagaaagaacaaaaaatggtgtcatgagaccaggaaaaagaagatcccacacaggagaaaagcgaagcctgctcataaggtggaagcttcacagcagattgcagcaagaggtagaaggttccaggagggaaatcctcaggagtgaaacagagctaatgggttagagcagaagcccccaatttttcttggtccatgacttccttgatgtcttagtaattttttgtagagatggggtctcactacaaaatgttgcccaggctggtcttgaactcctggcctcaagcaatcctcccaccttggcctcccaaagtgctgggattacaggcatgagccattgtgcctggctacttgtttttattttttgtagtgacgggatctcgttatgttgcccaggctggcctcaaactcctggcctcaagtgatcttcccacctcagcttcccaaagcgctgggattacaggcatgagccaccacacctggcctgatggtttagtaatttttgtattgctgtcttcaggctaaaagaaatatctaacagttctgtttattaaatagttagatccaaacaatttaataaatatttatgccctaacagcttagtagccattaaaaaaatattatgcataaatggaaagaaaaataatatttttatttttattttattcttacataaccacaattacttcctgatgggatgtgtctgccttttggacactgcagtttctcaaacctttgcatcaaattgtgcacctgtagcttcattttctgcttcactatgacatttgcccaatactcacttgttatcatagtaactgctgaaacccaactttgcaaagatatagcattattgtaagaaatgtagttcaggggccaggcgcagtggctcacacctataattccagcactttgggaggcaaaggcagatggatcgcttgagcccaggagtttgagaccagcctgggcaatatggtgaaaccccatctctacaaaatacaaaaaacaaaacaaacaaacaaacaaaaaaacacaaagccgggcatggttgtgtgcctttagccccagctgctcgagaggctaagatgggatctcttgagcctagggaagtcaaggctgcagtgagccatgatggtaccactgcactccagcctgggtgacagagggagaccttgtatgaaaaaggagaaaaaaaaaaagagctgtagttcactctaacattagaacagttaactaatagtttgtgatacctaacaaatattgactatcatttggaaaattcaaaagatcctatggtacatctgtgctatgcagtgaatgaactatgatatcctggaactgacttggtacattttgggaattgtgatattagagtatgtcaaaatatagttaatagacttttggctgacattttgaaacatatggaaaaaactaatgataggtatatggaaaaccagacaaataggctgggcgcagtggctcatgcctttaatcccagtgctttgggaggccaaggcaggaggatcacttgagcccaggagttcaagaccaacctgggcaatatagtgagattccatctctacaaaaaattttaaaattgcctgggtgtggtggtgcccgcctatagccccagctacttgggaggctgaggtgggaggattgcttgaccctgggaggtctaggctgcagtgacctgatcgtcactgcatttcagcctcagcagcagagcgagaccttgtctctgaaacacacacacaaaaaatgaaaaccaggctataaaaaagtgaagcaattattgactctagaaacaaggttggacaaaaaatgagacgagatgatatacttcttgacttaacaataaacaatatttgcatgatcataataacatgaacactgaccacagttttaaccaagagtgtgctggggttggtagacaaaagtaaaaacaagctagaaacttgttcacactgtggaacagcaacatagaaaacgacaaaaccaaagaatgaagatagggccgtgtaaacgtgggatttggaaacacagaggcagataccaaggaagcagctataagaggtaaaagtgtcaccaggagaaagattggggtatagggaagtaaaactattgcccttattctaagtcttttggtaatatttgacttctcaaacaatgtgcatgcattgctttgataaccacatttaaaaattaagccaaacaatgttaaaacctaacaaatataacccggctgccccttctaatctacgtaatatttcacatgcaaccgaaagtctcagagctctcccgaggtttctgcaaacctgagcctgagagtggagggatgaattatattctcacagtgctgccagcccggctgatgcctctgtgggattcttgtcctctgcaaagtatggggcctctgtgatttactcatcacacttcacctgccctggcctctccaaatcagctaaaaagagacagctgaggcccaagaggttgggggcctctgcagaggggttccttattaggcacccctttttcttcacatcaggcttagactcccacctctgtctgaggcctctgattcctgtccctgtcccagagagaccctaggagtgacctgcatttactctcacagttggctccaggcctgacacctgcccccgcccccaccaccacacacacacacacacacacacacacacacacacggcaggagggacagcagcaggagcagagcaaatggcacactctcttagaagaacagcagagaccctcatctttccttcaccaggcttcatctttccagaaaagagtggtggatttaagtagcaatttccccctccattacatagtattaccccccaccccatattgacaagcacaggaatcacagtgactgtgcaccgtgaccgccacacagcagtctgaggatgtgatgaccacagagctccttcttggggactggcgtttcccatgctctgcatgtgtgtgtgtgtgtgtgtgtgtgtgtgcacatgcaatgtggccaggccgccatgtgtctcagcagaatggtaagacgagtgaataaggcattgatccctgtgagcccaaagaacgcacgtgttagtctcttagtagcaagcctgtgagcaactgttctcaggtgtcaggagttgtgcctcactcatccagaataactgagagaggactttgggtccctttacagcccccgaggagggtccctttcccaggcaggccaaggaccccagtttgaagaagcttgcctgccctgcaactttattctaaaccctcagacagcaggttctgcattcttccccatcttccctgcagcatttaccaccgcctgagggaggggggtatcctgagcctactccctctttgtggggtgacacctgtctgcacagatattccagggggaggctacctgatggcgaccctctgaccctcaagctggctggtgtgaggatgaagctgcaggtctcgcttctcctctggggagagctggctgggctccccacgatggggcagcttgcagggaaaggggctcagtgcacctggccacccccttgcctatgggctgcatgttgaagatgtatattgaagctgcataaatggcttgtatttaagtaatccttttgactctgccctgggagtggggctgcaaagaggaggttgtggaaagtgcaagggaaaggtccagacctccagcaatggcaatgaagggcgcattctgggtcgagcatgccccagggggctactccctgtaactgctggcccggccccatggcctcagcaccccaggcccagtgtggacataatggcccttcctttagtgccccacaggacaatatccaggataatggaaggggacaaaagccagagcatcccagacacctaagactccttctctgggcctggtgggcatgggctgcagctcctcgggatcccatcctcaggaggtcccctctcaaggctctgccttcttcaaaacctgcctgacacccccaggcatgtgcaaccttctccacctgccccagttgctgaatgaggccctggcagtcactggaaatattcttcacttccagtaagacttccccaccatgctccacctcaccaagaccccttctagaaaacccggctgctacaggccctgaaaaggggagccaggagtgattgagggtggaacgccaagtgtcactacatccgaaattcagatagtcctcctgcagcaagtcaacttgcagacgtcatcaggaacccagcccagccaggtgcagtggctcatgcctgtaatcccagctcttggggaggctgaggcgggaggattgcttgaggtcaggaatttaagaccatcctgggcaacatagtgaaacccccatctctacaataaaataaaataaaataaaattaaattaaaatcagctatgtgtaatggtgtgcatctgtagcccagctacttgacaggctaaggagggaggatcgcttaagcacagaaggtcgaggctgcagtgagctacaacggcactactgcaccccagccttggtgacagagcaagacactatctctaaaaaagtaataataggtagggtatggtggctcatacctgtaatcccagaactttgggaggccgaggcaggtggatcacttgaggccaggagctcaagaccagcctggccaacatggtgaagccctgtctctattaaaaatacaaaaattagcagggcatggtggtgggcgcctataatccagctattcgggaggctgaggcaggagaatcacttgaacccaggagatggaggctgcagtgagctgagattgtgccactgtactccagcctggacaacagagcgagactctgtctcaaaaaaaaaaaagtaataataataaaattttaaaatacaaaagaaaccaggggcatgtggctggtgtccagtctttcctgttctcccaccggaggcgggaccgggctctggacatgcctgagctggtttactgattgctctcctgagctgcatgcaatgggctattctcatcctcttcccagaaaaccccctcccttgactcccaagtccatgcccctctccacccccttgtgcttgggacctgagcttgaactccaaatgcagcagctatgactgcttaagcaggtcctcccgaggagcagggctgctgggggcacacacactgtcctgaggacatgctctgcagccattgaaactgttagtgtctgccagtcaggaaactctcaccttctgcaaggcagtctggctctccatggcctccgagtcaccgcagccctggatcaataccagtgtaaacagagcttcgctgtgagttgttagttgtctttcctggtctggggcgtaattcatactgttggctcctggcacctggctcgccaggggctggcaggggtgctggggagaggggtgtgtggtcagggtgagagcacagtgccctggagggcagttccgggagaacagtgaggacatctccaacaaggggctgggggacaaacacaccctctcccgcagcacaggggactggactctccccagatctcctgtgcagctgagctgcccacatgtctctgtctgtccagcttgctgaggacaatgtgttaagaaccgtctgctcagctcataaagaggcttggcccttccgccccggctctggttgggggtgtttcagggaaacaggctttccagggatgcttcggcatggccgtgccgtatcctggcaaccagacccaaagccacatcctcttgagaggactgggcagggtggggaagtggccactgcgtggggctacccccattgtccactccacccttagctggctctatgcataccctgagctgtgcaggagtcacagctctccctgagtgccacaccctgtcccaagatggcctgcagggcattcagaggtgctattttccaccatggtctccctgggctcctgggaaactccttggccataacctcagttttctcatctgcaaagtgaggtgggctgggagccaccactccctacgataatcccagtgctttgagaagcggaggtggttggatggcttcaggctaggagttcaagaccagcctgggcaacatagccagaccctgtcttaaacaaacaaacaaacaaacaaacaaacaaaacttaaatgggtgtggatgatactgtctttcacagacccagcgctccccagctgcccatgcacctctgccactcctccttcctggataattgatttcaaagcaatggcagttgaggtgactgggctggggtctgtgccgtgcagccctctagacacaaactccctgcccttgaggcacctccttatctccaagcccagccaggtctagtcatcctgggctcctcgctctgtttccccttatccaggagctagaaaaagactcgtggcatactccccgccacccatagcctgctcaatccacagaggtacagatgatccaccaaagtccgcctcattcaggcctgctgactaccttgtcaaaccacatctcctcctacagcagaactgtggggagacaggccccaggctggagtgccccccagccagggcctcaccttcaacctttaatgctccccttgccaggtttctgaacatatctgcaatgacctgaatgtgtctcccaaaaagcaaaatgttggaaacttgatcctcaatctaagtgttgagaggtgaggcccaaagagaggtgataaggccatgatggcagagtcaaaggactaacactgttatcgaagaagtgggtttgtcacacagggggaatctggccctctcttactctcactgtctccccctctcaccctctctttgccctttagccatattgtgaagcagcaagaaggctcttatgagatgctgaccttgttgatcttgaacttcccagccttcagaaccacgaaccaataaattcctgttcattataaattacccagtctgtggtattctgttacagcaacacaaaatggactaagacagtcttctctgctgtctctcccataggcagttctgccagatcccccaaagcccaccaatcccctcaccccagggctccagaagaggttatgtcctctttggaggtggacccatcctgatggccttggacctgtggctccctgggcctcccatcagcccctctatttggagagtcactgcagccaggagccccaagaagggacttctcaattccccaatagtggacactgtgttgctccacccagatctcctctccaggggctgatgccactatgctggtcggggttctccaaggagacagagccaacagatagatagatgatgatagatagatgatagatagatagatagatagatagatagatagatagatagatagataaacacacatgagagagagagagagataacagaagtcaggcacagtggctcacacttataatcccagcactttggaaggccaaagtgggagaatcgtttgagcccaggttcaagaccagcctgggcaacacagtgagacccccatctctacaaaagatctgtatgtatgtacgtatgtatctattatctacatgagattttttaggggaattgtctcgtggttatggaggctgaggtttcccatcctcagccacctgccagctggagacccgggtatgttgggagtgtgactcactccaagtctgaaagcctcagaaccaggaaagctggtggtataactctcagtccgaggctgaaggtctgagaacctgggctgggggccactggtgcaagtcctacagttcaaagcctggagaacctggagttctgatgtctcagggcaggacagtagggatgtgtctgctccaggaaagagagtgaattcacctttcctctgccttttcgtgctatccaggcccccagccaattggtggtacccacccacattgagggcggatcttcccaactcagtccattgactcacataccagtctcctctggaaacaccctctcagacacaaccagaaataatgctctcccagccgtctaggtgtcccttaatccagacaagttgatgcctaaaattaaccatcatggccattatccccatgggagctgggaatatccctgccttcttccctgggaattcccttggcacccgggaagcacctttcctaagtttatgcctcctgtggggtgatcctgtatccagcgactggctgatgtgggagtacaaagccctgcccctcacctcagtttggggcaactctgaaggcgtgtccagctccagggctcccccaggcctggctgaggcctagctgtaactgcactggggggtcgccttccctctctgcccaccctcgccctccccgcttccctatagggggtctctcctgagagccatcagtgtaaacctcctgccccaaactctccacctcagctgcttccagagaactcagcctaagatgcctttgggctctggggccaggtggctgtgagcacagggggcacgggcttgcatcctcttggaattttcactgcaaactcagagtcctgactttcacaggtctggccgtctcatgggtctggccccataggccttccctagctcagcccttgggcagcagactccctttgtaatagacactgtggctcctcttcgatgccctgttccatactgggcacctctgccctggattccaccatctgtacctgccactcctcagaagatcacccagggttagggagctgccctgcccacaggtgcagagagtcttaagttcctggaagctgatgagagcctgggcagtgcttagtcaatgactgacaggtgcaggagtaggaaagcccagctccattgcctcaaggtgaggacagccggactttgcctgagatcccaatcttgattgacttcttactcttccctggcctgatcccccctacctttctagcatcagggactagtttcatggaagacaatttttccgtggatggtgggggaggggagatcagggatggattggggataagtctgtttcaccttagatcctcaggcattagttagattcttataagaagcatgcagcctagatccctcacatgcacagttcacaaaagagttcacactcctatgagaatctaatgccaccgctgatttgacaggaggcagagctcaggcaataatgttcactcacctgccactcacctcctgctgaggccatgaaccagtactagtccatggcctggggcttaagaacccctgctttataactcatttgcccatgaatgtcgatctcaggcttctctagggaaccccacccaagacacttctctcaacaagagaaaaaaatggagtccagacagcgccaacatatatacacacattcaagcctggggggcttgcatcttgtagtttgcatgtttatttcaggccgggaaggactttctcccacccaaggatccgccatgtgagaatcactcatccgcatttccttccattatttttgagagcttcatttgttatgattaaagctttaatccactattggaatttattttggtgcatggtgttgagaaggaaaccaatttaatatttttcataaaacagttaactaatgatcacagcaccatttatttatttatgtagtttttaaattaaaaatgaattagaacatgaaatgatctccaagatattattaagtaaaaggaaaaacaaagtgcaggatagtgtgtataataagctcttatttatttatttattaaatacataaaaggaggctgagcgcggtgactcatgcctgtaaccccagcactttaccaagggggaatattgcttgaacccaggagttcaagaccagcctgggcaacctagtgagactcccatctctaaaaaattaaaaattaaaaaaattaaggttgaccgggcacggtggctcacgcctgtaatcccagcactttgggaggccgaggtgggcggatctcaagatcaggagattgagactatcctggagaacatggtgaaaccctgtctctactaaaaatacaaaaaaacttagccaggcgtggtggcaggcacatgtagtcccagctactcgggaggctgaggcaggagaatggcgtgaacctggcaggtgaagcttgcagtgagccgagatcacgccactgcactccagcctgggcgacatagtgagactctgtctcaaaaaaaaaaaaaaaaaaaaattaaagttgtacatgtctgtagtcccagctactagggagactgagacaggagggttgattaagcctgggaactcgaggctgcagtgagccatgatcatgccactgcactcactccagcctgggtgacagagtgagaccctgtctcaaaacaaaacaaaataaaacatacatataaggccatctataggcatggacagtttctataaggttttgtagaaactgttgatagtggttgcctcccgatagagggccagggctctgaagtggaaaggagaactacttctcactgagtattctgtgatccatttgaattttttgtcatattcggtcattagctttttagtaaaatttaagcgaattttaaaaatttaagactctgtgggttgcaagtaacaaaatgtaactgaagctaacttgaacataaagggacacatgttttgaaggatgcagtgatcaccctggagccctaagccaggagggcagccagtgtggagatgcgtggaatgaaggatgctaataggataccccctcctgcctgtccagctgttcccaccctacatcagaggacttctctcccagcagaaagtgcctgaaacccacctgaccctgcccactctcgccaggcagggataaggttcgtcttcttagagcatacttcttttttagagaaagcaggccactccactctatctgcctgccttcctcgttgtgccacccataggctgaatgataatgaaatcttccccaacacaccccatggatggtagccaatttcatttagaagagagaacatgttaagagccttctagaatagaacttcaccctacttggttgccagtccaaagcagataccatttcttccttcctggagagaataaggcagtgatggttccagtgaattcttaccttccataattctttggtggcttgtttccatgaccagcagtcaccccagggtttgcttgtaatggggggaattccctatccagtgtcctgtggggacacccagaaaggagcaccgtgggggatcccctgaaagggctgacggccgtgatgatttactcccacttagagcctgaacacaaaactgtggctttcttgagggactgagaatcacaagccccctgttggccagattttcttttttctggtactacatctcttataaaatcctgagctgtctaactatagggatttcctatagccttactctctattggtccctactcttacagccaagagccaataagcccatcaattacatttctaatatataaatgtgaaaggaaaataaatcttggaaccccaaaatcactaagctaaaggaaaaagtcaagctgggaacttctcatggcaaacctgcctccctttctattcaatgatctaaatgtgtctcccaaaaagcaagatgttggaaacttgatccccagtgcaagtgttcagaggtggggcccaaaaggagaattgataaggccatgatggcagagtcaacggattaatgctgttattaatgtgagcacccctctgtgcactgagatgatgcatatctgattgccttcttcagagaggctaatcagaaactcgaaagaatgcaaccatttgtctcttatctacctatgatctggaagccccctccccactttgagttgttctgcctttgcttcgagttgtcccacctttctggaccaaaccagtgttcatcttacatatgtcaactggggtctcatgtctccctaaaatgtataaaaccaaactgtgctctgaccaccttgggcacgtgttgtcaggacctcctgaggctgtgtcacagatgcacgtcctcaaccttggcaaaataaactttccaaattaactgagacctgactcagatatttggggttcacataaccaggggagatatttctcagtgttcaatgggacaccttcactattgacttatttccttactcccatcctgtctcagtaagtctttgagggaggaacagtttactcataaccccacttctggtaccaaagttgatctttgttaatattcttctgattatttcattcgactagaataggcttagacacaaacatgttgttgttgtattttaaagtatgcagaatctgtggacaggaatccagccaggtttcaggaaaatctgtgactcagcctggactcccattaccacatgactgagaacatggctggcccctttcttgactatttaaatcactggtttagccacaggaagggctgactttcccagctctattccaaaattctggtcaggggaatctctgttggccaagtttgggataatgactactcttggttcaaacttcataggccaggatggaggtagggttagggttggggagcaggtaggatgatattgtacggaatggacaccagcacaattgtcaaaataaggggctgggattagagacttgtttgaacagagaagacatctccaaaaggtaaacaaaaacctaaagatatacaggcacacctcattttattgcatttcactttattatgcttcacatacattgcattttttacaaattgaagatttgtggcaaccctgtgttgagcaagtatattggtgtcattttttccagtcacatgtgctgactttttgtctctgtgtcacattttggtaattcttgcaatatttctaactttttcattattattgtatctgttatggtgatctgtgatcagtgatttttgatgttactatgtacatgtacatagtatgtacatggtaactatgtacatattactatgtgtacatacatgaccctataagacagtaaacttaattgataaatgttgtgtgtattctgactgttccaccaactgaccattctcccctctctcttcctctcctcaggcctccctatgtcctgagacacaacaatattgaagttaggccagttaacaaccctacaatggcccctaagtgttcaagtagaaaaaagagttgaatatctctcacttcaaattaaaagctagaaatgattaaccttagtgaagaaggcatgtcagaagccaagatgggccaaaatctaggcctcttgtgccaaacagctggccaagctgtgaatgcaaaggaaaggcgcttgaaggtcattaaaagtgctactccagtgaatgtctgaatgataagaaatctaaacagcctattggtggtatggagaacgttcgagtggtctggatagaagatcaaaccagtcacaacattcttttaagccaaagcctaatccagagcaaggccataactctctttaatcctgtgaaggctgagagaggtgaagaagctgcagaagaaaagttggaagctagcagaggttggttcatggggcttaaggaaagaagctgtctccataatataaaagtgcaaggtgaagcagcacatgctgatggagaagctgcgtcaagctatccagaagatctatctaagatcattgatgaaggtggctacactcaacaacagattttcagtgtagacaaaatagccacctattggaagaagatgccatctaggactttcagagcttgagaggagaagtcaatgcctgacttcaaagcttcaaaggacagactaactctcttgttaggggctaaggcagctagtgaccttaagttgaagctaatactcatttaccgttctgaaaatcctagggcccgtaagaactaagctaaatctaccctgcctatgctctgtaaatggaacaacaaagcctggatgacatgtgtttatagcatggtttactgaatatatatatatacacatatatatatttttttatagtctggaggtcttttttttttttttttttaacaagtattatgccatgagttcatacggaataggttccagcagctcaggctccttctcattggttctcacaaagtgtgcttctctgggtggagcaggctggcacttcagttgaacccaggtacctttctctttggcttctttctttttctgatcattttccttcatgtatttcaggaagctatcccagctctcagagtgcttaatgtgctcaatacgcacattaattctcttggcaagaatcttgctcttaacttgtttgtttacaacaatgccaacagcatgctgggtaacattgtagactcttccagttttaccatggtgacacttgtgaggcattcctttttgaacagtgcccattcccttgatgtctacaataacacctttcttatagattcgcatatacgtggccaaaggaacaactccatgttttctaaaaggcctagagaacgtatatcgggtgcctctcctctttccctttgtcttcgtcattttggcaaattactggaagatggcagttccggctgaaagggtggtttactgaatattttaaacccactgttgagacctactgctcagaaaagaagattcctttcaaaatattactgctcattgacaatgaacctggtcacccaagaactctgatgcagatgtacaatggattaatattgttttcatgcctgtgtaggggagtcagagatcaccttcaacactcccttgagcacttatgtgggctgttcggctggatctagaaaccaatgcacacccaggtaaatgaacaagagaaaagcatatgaatgttatgagttttacatgtacatggggatcttcacaagagagtgaagtctgaagaagtggccaaagcaagatcttttcatactttttagataaagaacaatgaatttgagaagaaataacaggacaaagaaaatttggcaggggcagtaaattttctaggggtcactagaagatatggagagggaaactagtggaagataacagttactttgttaaatctatttattcaggtccattgtagccaccaaatcccagtctctgttgatcagagctgttttcttgccctggtataggtgagggtaccagtctccaagaggaatctttatggcttgctgaatgcagaaagaggtcagctagccctttctgcaatcataatttctttgatgttcccaaaataatcaatataccaagatatgattggtataataatcattataccaatcaataatcaatattttgagatggcacgtcctttgctccttcatctactaacacaacatccattctgcagcccatggatcaaggagtaattttggtttttaagtctcattatttaagagccatgtgttgtaaagatacagctgtcacagggagtggttcctctaatagatctgggcaaagtgaactgtaaaccttttggaaagaattcaccagtctagatgccagtaagaatatttgtgatttatgagacggaggtcaaaatagcaacatcaacggaagtttggaaaaagttgattccaatcctcatggatgaatttgaggggttcaagacctcagtagagacaataactgttggtggggtggaaatagtaagagaactagaatgagaaatgaagcctgaagatgtgactgaattgcttcaaccttgtgatcaaacttttacagatgaggagttgcttcttatgcatgacagaagaaaaagtggtcacttaaatctactcctggcgaagatgctgtaaacattgttgaaacgacataaaggatttagaatattgcataaacatagttgataaaagcagtggcagggtttgagaggattgactataattttgaaagaagttctactgtgggtaaaatgctatcacacagtattgcaggctgcagaggaatctttcatgaaagaaagagtcaatcgatgcatcatatttcattttgtcttattttaagaaagtgccacagccaccccagtcttcagcaaccttgaccctgatcagtcagcagctatcatcaacattgagccaagaccctctaccagcaaaaagattacagctagctgaaggctcagatgatcattagcatttttaagcagtaaagtatttttaagttaaagtatatgtatttttttagacataatgctattgcacacaatagactgcagtatcatgtaaatatagcttttatatgtgctgggaagcaaaaaaattcatgtgacttgcttcattgcaatatgtgctttattaagttggtctggaagtgaacctgcaatatttctgaggtatggttgtataagatgtattttctttttttttgagacggagtgtcgctgtgttgcctaggctggagtgcagtggtgcgatctcggctcactgcaagctccgcctcctggattcatgccattctcctgcctcagcctcccgagtagctgagactacaggcgcctgccaccacgcctggctaacttttttgtgtttttagtagagactgggtttcaccgtgtttgccaggatggcctcgatctcctgacctcgtgatccgcccgcctcagcctcccaaagtgctgggatgacaagcatgagccactgcgcctgaccaagatgtattttctatttcaagagaaatgtctgtagatgacagaaaaatcagattcaagaaaacaggaaatacccttgataccacctgctcagacaattactattaataccttggttttggggtggttttttgttttagtttttagagatggggtatcgctatgttgcgtaggctggacttgaacttgttgttcaaccctcccgttccctcctccacgtcatccttgggtacacgtcctaacagtcttttttccccattttttttttttttgagacagagtttcactctttttgcccaggctggagtgcaatggcgcaatctcagctcactgaaacctccgcctcccgggttcaagcaagtctcctgcctcagcctcccgagtagctgggattacaggcatgctcatgcgccaccaccccagctaattttgtatttttagtagagacagagtttctccatgttggtcaggctggtcttgaactcccgacctcaggtgatccacctgccttggcctcccaaagtgctgggattacaggcgtaagccaccgcacccggctgtgtccccctgtttttgtaataaattttacatatatgtggcggccaaatataaatgctcaccttgctttattagagactggaaactatttgatctttcttctcttttttgttgctttagagagacagaatacaaatatctcctctctcctcctgggaagctttgcaaaattaagcccttcctgccctggagagaaaagggtaatcaggtttttggttcttaaatgatagactgaatggctcatccaatcaggcatattgtgaaagaacaagagaagatgagcagtttgttggcatttgaggtgtgcaataaataatactgttccctccccaccacgttttgaactgattgaaaaataaaatacagtaatcagacagatggagatgaaattgtcagcactgatgaggctaacaggatctgcagccctgttgcctgttgggcttcctaatacacacataaggaaatatacatataaatatatttattatatataataaatatttatatattatatataagtatatattttaattatgtataataatatatagcaacatatatgtaataaatgataaacatatactttatatcatatataaacttatatatgaagtttattattatgtgtatatattatatatgaagtttataatatatgtttgtcatgtatacctatgaagtttattattatatgtaataaaaatatctattttattatacaggcagagtctcactctgtgtccaaggttaagtgcatggtgtgatcatagctcactgcagccttgacctcctgggctcaagccttcttcccatctcaggctcttgagtagctggtgctacaggcatgcagcaccacactcagctaattagaaacaaatattttgtagacacaagatctcactatgttgctcaggctagtctcaaactcttggtctcaagtgatctccccacctcccaaagtgttgggattacaggcctgagccactgtacctggcctggacttcctaatattataccccaccaccaactccttcctcaccagctgggacaatggttagtgacagccccctgcatacacatctgcaaaaatgggtcgtaccatattcactttgctctgaaacctgctctgttccttatcaataccttttactttatggatctccattaactgggatcttagttgttataacttcggactttttatagagagtgctgtaatgaacatctttattcatacattgtttttaatctatttgatgatttccttatgataaattccaagaagcggctcacattgcaactgtgtacatatattgccacattggtatcaggaagatggtaataattcagaatttagctaacagtgtttgaaagttcttgtttttccacatgctcataggcattggcaatcctcctttttaactctttgcaaatatgatagaccaaaacattgttttaatatacgtttctgttggtcactgaagttgaatgtcttttaatgtttattgcatatcccctcttttggaattgattgcctttgtcttttcatcttcttttattgattattaagagctctttatatgttaagaatgaaaccacctttgcaaaaattatgacagtgagaaaaatctggcatagcttactccatcttgcttctagcctcgaagttgtacctattcattcctggacacatgccaagctaactatagaaggcagttagtttacagtttaactttgaaacaaagacgattacagccccttcctaaaaccagcatctccttgctttgggaccaagattgcctttgtaaaactaacagattagccacaaggttaacatatggctaagagacatgtagccaggggccacaagattcctaaccttcccaattgcccctagagattgcatctattgtaaaacctaaggttggtgtttgaggtatttcccagaccctgcattctgatagaccagcttccaccacccagactggtaaccataccaagaaactgagtcaactgaagtcaacaatcattcaaccccatatgatttcatccctgaccctaccaatcagcattccccattcctctggctccttgccaccaaactatccttgaaaaaccctagcttctgaatttccagggaggcttatttgagtaataaactcccatccttccacttggctggccctgcaattattaaactctttctgtactgcaataccgctgtctcagtgaattggctttgtctgccacaggcaagaataacccattgggcaattacaaggacaatgatcttcttctcatcgtaatatgagcaaatatatataagcataatatgagcaaatacaaaaatgtgagtattgcaaatgactctctacatacactgtcttggtaaaattttgttttctggttttatggatgatatataggaatcacctggaaaattttcaacatacacaagctggctaaatttactaaatatttagtatattccagacactcctctaattgtctcacatacattaatttatcaaattctttaatcctcacagcaatagctctgacctgggcactgagaggttaaataactgcccaaaggcacacaatcagtaaatgggatccaaacttattgactggccacagaatccttgttctaactctgtcctaatgccacatgtattgagttgaaacactggagagtctgcaaagtttccttgggatgaagctggtatgtgcatgttaaaaaactcttcaggcaggctggacgcggtggctcacgcttgtaatcctagcactttgggaggccaaggcaggtggatcatgaggtcaagagatcgagaccatcctgaccaacgtagtgaaacctcgtctctactaaaaatacaagaattagctgggcgtgggggcacgcccctctagtcccagctacttgggaggctgaggcaggagaatcacttgaacccgggaggtggaggttgcagtgagccgagatcgcgccactgcactccagtctggcaacagagagagactcgtctcaaaaacaaacaaacaaaaaaacaaaaacaaaaaaaactctccaggcggttttgacatgcccccaggatgagtaccactgattagtagtgttttgtttgtattttgcctaacagaagttttaaatttttaatgtagtcagatttgtcctatttctgtcattttattctttagtactgcaataagaaaagagtcttcctcagcccaaatgcatcagttatctattgctgcacaacaatctgctctcaaaacatagtggcttaaaacaatagcagtatactacttgtttcaattatctggatggcatttaggtggagctcagctgggtggttttcctgctggtctcacctgggatcacttacacaactaaagctgacagctggttctggctttgggttggggcatgaaggagttccggaaattccaccccaaaataagccattttgaacttcaaactgagggcacttggggaagagcaaatgcaggaaggagattcctctgagcttcccttatctgcctgaagacagagccttctaaaggaactcagttgtcatgaatttcctccccaggaatctcatcagtcaaggctgtttaactcagatcacaggagaggaagctggaggtcaacaatatgtcaacactttgtcccaggctatcacttgttcttctgaagggtcatccatcattccccaaaaatcacttactctcccctaagctgcctacatcccctctttcctatggtgagggtatatatgtttctagatctcactgggttggagaatattcatttttccttcctgcaatgctcccatgcatgtaataaattgatatacctttttttcctattaatttgaccactgtcagtttatttcacagacacaattactgaatcctcaggaagtagaggcatgtttttctctcccctataggcacctcggttctgcaccacatggcttctcatcctctaagaggctagattggcctctttgtgtcgtggtggtctcagggctccaagagcgccaggtggaagttgcaacatctcttaaggtagaggctccggagctaacatgatattgcttctcctgcactatattggtcaaagcaggtcatgaggccagcctagatccaagggatgatatctttgttgacttcacttcttgatggaaagaacaacaaagccacattgcaaaggggagtgggcatggggaggcgtgactcattggatgccactcttgtaacaatctaacacaccaagatgttaaattcactcttctatgaagtcttctagtaccttttttttttttttttttttgacagaggtttgctcttgtcgcccaggctggagtgcaatggctcactgcaacctcctcctcccgggttcaggtgattctcctgccttagcctcccaagtagctgggattacaggcatgtgccaccacacctggctaattttttgtatttttagtagagacaggttttcaccatgttggccaggctgtttttgaactcctgacctcaggcgatccacccgccttggcctcccaaagtgcagggattacaggcgtgagccaccgagccctgccctactacctttttttaaggtaaaatttacataatgtaaaattaaccattaaccactttaaagggtataatttaaagagatgatccacatcatctctatctagttccaggacaattttatcaccccagagggaaaatccatacccattaggcagtcactccccattctcccctccttgctgcctcagcccctggcaaccaccagtctgttttgtttctctatggaaatcatacaacatgtggccttttgggtctggcttctttcacttgccatcatgcttccaagatttatccatgttgaagaaggtatcggtgcttcattcctttttatggctgaataatattccaccatatggatataagacagtttgcttggctattcatctgttggatatctgagttgcttctaccttttggctatcatgaatatcaccactctgagtatccagtactctcttgattcttcttaagttgaaatcatttccacatctgagattcaattttgtatgtggtttgaggtaggaaatttcacttcatttcttccacttattcctatgtattttatacactattcttcttatactgactttatcttcctcttttgttaaataacagtgtgtgcccttgagcaggttttaattttttattgtttattttttgagacagtctcactttgtcacccaggctagagggcagtgacacgatctcagctcactgcaacctctgcctcccaggttcaagtgattctcctgcctcagcctccaagtagctaggattacaggcatgcaccaccacacctaatatttgtatttttagtagagatggggttttgctatgttggccaggctggtctcgaactcctgacctcaggtgatccacccgcctcggcctcccaaagtactgggattacaggcatgaaccaccgtgcccagtcttgagcaggtttttaaaaggatttttttagagatggaatcttgctttgtcacccaggctgcagtgcagtggcacaatcatagcttactgcaaacttgacctcccaggctcaagtgatcctcctgcctcagcctcctgagtagcttggattacaggcgcaaggtatcacccctgacttgggcaaattatttaccttttttgtgctttaatttcctcatctataaacttgggatagtaatggtaacctacatagggttgatgtcaggattaaatgaattaatacgtgtaaagtgtttagaacagggtatagtccatagcaggtgccaagtaaatacctattatttaattccaaatttctacatatgaaaggatctactttctgttctgttgtcttacttatctatttcaacttttaatcagcatcccaagtctacttttattgttctttttcaaatcattttttagttcatcttggtcctttggaattcttcccattgaattttatcaagttctccctaaatcctgctgagaactttattggagttacatttacagattaatttaggaggaattgaaatattgttactaccaagtattcttatgccataacacatctcttcatttattaagctcttattttatctcccatgatagagttttatagatttttaaattttataaaggtgttgcaaatttcttttcctggatattcttttctgggatattttatatttttgttgttatgctgaatctttttaccccattatatttatttttatttatttgttatttttaaaaatattttttattatatagagacagggtcttgcttattgcccaggctgttcttgaactcctggcctcaagccattcttccaccttggcctctcaaagtgctgggattaaaggtgtgagccacagtgaccagtccttgttacatttaaccagctactattttctatatgggaaaactacagatctcagtcctttttttttttggtgatattctaatggtttttcattcatttaattttttgaaatcagataattgccatcttttctctttttccatcattgtatctattttttttcttgactaattgcacaggctaagactctcggagcaatattgaataaacaggcaatggtggctctaagacagggtttgaggaatggcagtgggcggcagggagtgtgcctgcagagcagcctgaatgggtatttcccggagggaaggtggtcacgtgtctagggaatgctccaaagaaaggagaggatggtttcagtacagagtgagggttgcgcctttgattaggtaagtggtgaacagttattagtgctttctgagcatcagactggcagagtcaggtcatattttagaaggactgctcaggtagaggtgaccacagggaggtgggacccagacaagtgtgacccattaagtccttacgaatcattaaaggagaggtgctaaggatgggagctgagtgcggctatgatggaagacgccaggagattctatggagattagtgttatcttaaacccctctggccctgcacatggggagagcaagttcatgcttcttcctaaagaagtgaagcaaggacggagcaattttccatctgatgtcaggccctccctgatggctggccccaagggcgacctctgtgatccttcctgtctcaccctggaaaaaaatgtctatattctcacttcatacttccaagttatgccttggttttttgggtttcatttttgttattggttgttggatgtaaaataaatagcaatgcataaaaactcaaatttttcagctgcgcatggtagctcatgcctgtaatcccagctatttgggaggctgaggtgaaaggattgcttgagctcaggaggtccaagctgcagtgagctatgatcgcatcactgcactccagcctgggtgacagagaccgtgtctcttaataaaaacaaagaaacatccaagtgttcaggcctcaaagggctgtggccccagctttcagtgtaactcatctcacaaatcagtggtggtaactcaacttcgtccttctgtggtcaagtttcccccaactgtctctgttatctgaccttccttggctcagccacatatgggtctgggagcacagtggtcatcaacaggtcgatggagatggctggacctcagcagcagaagagcaagaggagccagaggatgaaactccatctggaaactgtgagaggagaagccagcccaggccctgcaggagggagcagctactcttcccagcagaggcaacaaggaggggcaggagcaagcaggtagggagagaaggggcagccttcatggggcagagaggggaatgggctgatgggagctggcagggcttctgtgatgagtttgggcagtggggtgcattttttttgagatggagtcttgctctgtcacccaagtagggtgcagtggtgtgatctcagctcactgcaacctccgtttcctgggttcaagtgattctcctgcctcagccttgtgagtagctgggattacaggtgtgcaacatgatgcctggctaatttttgtatttttggtagagatgggatttcaccatgttggccaggctgatctcgaactcctgacctcaagtgatccgcctgcctcagcctcccaaagtgctgggattacaggcttgagccactgtgtacagctgggtgcatgtttaaaaatagaggtttgctgggaggtggaggttacagtgagtcaaagtcatcccactgcactccagcctgggtgacagagtgagactctgtctcacaaagaacaaaaacaaaaaagaggtttgacctgagaaatggagacacctcaaagtcctagagggatacacccagggggaggacaaggcccagcagaaagacctttgtccctctgaccccaggtcccaccaaggaacccaagctcttgtggtggggggcctacctagaccccactctcaagccataccctggctctgctgggcttccaactggccctagctgcccctggttgtctttattttcataaggatgaaagcaatgccgtgtccctggcttctgggacatcaaggtccgagaatgatggtagacagtggatagaccccaattttctgcccaagcccagcctgggattcctggctgggggctttgacttggcagctggcaccagggtgtctcatggggatgcaggtgatggtttgaaatagcctttgcaaaaattatgacaatgagaagacccactgactctatcttgcttttaacctctaagctgcccttgttcatttgtgggcatagaccaagctaacttatggaaggaatttaccttatagtttaacttcgaaacaaagatagtaacagccccttcctgaaatgaactcccttcttgcctggggaccacaccacctaggtaaaactaaggaattagccacaagattagaaattatggtttaggagtcatgcagccagaggccacaggattcctaacttccccagttgctcctatggataacatcacattcatcaaacctaagattggtgtttgagacagttttcagacactgcattccaatggaccagctggtgccacccagactgataaactggctcagctagttctatgatcctatctagtaagagaagacagcaacaagaacccacttcaatccccctatgatttcatcgccaacacaaccaatcagcgttctccactccctagccccctgcccaccaaattatccttttaaaaccctagtctctgaatgttcagggagactaatttgagtaataaagctccagtgtcctgtttatctggctatgcatttattaaagtctttctctattgtaataatgctgtctcagtagattggctctatctaaccagcaggcaagaagaacccattgggcagttacaggctgctgaatgacaaggctgctcttcccacacctgacagtgcctcagcctcagctggcaaaactcatcacttcacctgaaaagggaaaaaacccagagctatctctggcaatagaaggagcagagttttcctaagcatccaagacagaccccagaccctgaacgaggtaggagactactcatcctggcaactgcttactctgattatggggttatgaggcctgcttcaagggagaactctgaagttgcagctttccctttccatgacagaccttggctcatggaccacacccctgccccatctctgcttggcttgtgtttcatggtctgcatgaagaaccaatctaagtctggttttggctttatttatttttgagacagggtcttactctgtcacccaggctggagtgcagtagcaccatcacagctcactgcaacctcgacctcccaggctcaaggtgtcctcctgcctcagcctctggagtagctgggactacaggtatgcaccaccatatttagctaatttttaaattttttttttagagacggggtcttgctgtgttgatcaggctggtttcgaactcctgacctcaagcaatcctcccacctcggcctcccaaaagtgttgggattataggcgtgagccagcatgcctggcctggcttaatgttcatgtgcttgcccttgctggaaagagagcctattggcaattgatgcagagggagtgttttaattaatggagctggcctgaacatcaggctggtgcaactttactcaacgctaaggatgatcacagcttaacgtgggggagaagaaagcaatgaaagaaatagatcagatgaggcaatattgggagtttatgaagtctgtgtattttccagtggctccacagtgatcgctcttaaaccggctgtcacccccgcatgaattatcacctcaacctgggaggatggggaggccgacaagacatacaaccacacacaaggcacgggctcttgcctggatcataattcttcctcatgctgctaaaacggagagcgctgcgatagcaaagaggcatgtggcccttgtgatatcttcagaaagaaaaaaccctgggggcaagagaggaaagaagaaagctaagaaataaataacaaagcaggatgctatttacatagtgagggaaggcctttgagactgagctcagcgccttggatgtcagtaataactcagtgatgggaataaagagactcactgcaaacccacatcgcctgagatggtatcagcgatgtttttctctttgtttccagacaaattccagcacagcgatgggaagacaagcctgtcgaagggaatggtgaggtgggggtgagggtgagtccggtggtccccgtgaagactcaattatgttggctgtgaagagattaatgagaattgaattttctattgatgtaaaactgccttttgcacctgctgctggcatcctcattactggttttccattacaggggattatatggtacaacgaaataaactttatgcttcctgggggatgctcttaaaatgggtttactgtactcaaactggtggtgaagtgggttacctgagagaaatatgatttaatccctgtcttttccttttgtggaccagaaagcctctatccccttctggaaatcacgaggtgcagacgttttcaggtctgcgggccaggctgaggctctgcgaggtataggcccaggcatgccctgcttgctctgtccctaaacatcacagggatgatgaagttgaaggaatctttggcttcctgcatcagaatgaatcacagggagtgatgctctggaagagctggcccagagaccagagtgtagggaattggggtccttgggatttctgtaacttgtcctttgggaaggaggtaaatgtgtctgtcggtggaggcgtgagaggcatctgtggccttagaagataatgagcaagtaaacaccaggtgagagaaaactgcttcctgtcctgtgaaccacctgctcctccctccctcagttgagctggggaggccagggtccagggtgaaaccatctctgcccaggaaaatctcaataaatgcttctttaaattgttttaagttttagggtacatgtgcagggtccagggtgaaaccatctctgcccaggaaaatctcagtaaatgctttttttgttgttgttttaagttttagggtacatgtgcaggtttgttacataggtaaacgtcccgtggtggtttgctgcacccatcaccccatcacctaggtatcaagccctgcatgcattagctatttatcctgatgctctccatcccccaccaaccccagaagccccagtgtgtgttgttcccctccctgtgtccatgtgttctcatagttcagctcccacttgtaagtgcgaacatgcggtatctggttttcagttcctgtgttagtttgctgaggataatgacttccagcttcatccatgtccctgcaaaggacatgatctcgttcctttttatggctgcatagtattccatggtgtatatgtatcacattttctttaaccagtctattattgatgggcattttggttgattccatgcctttgctgtaaatgcttgttaaatggaaaatagtagcaccaccctcaagagcccttactcatctccaaccaggataagtactgatctttcagcctctgctgttccatctgttaagtgggcataaaccaggatggtgggggctatgggaagccattattctcagcagtttgatgtagaccttatttcatcgaaatcacctttatgatgctaccttctaaacacagcccaaaattggatctccaagaatgcaggtggtaccttgtgtttacatgagggtgcactagaaccccatgttatgggggagccctgtgagctggagtgggaagcctggatgggaagcagaagtgtcagaggcccacacacagctgtttgtgcttgtctctccctgaagcgttgttcaggatgaacctatcttgagccccagagtccacagatgtcactgcttctcctgagcagctgccatggcagatgctttcccgaggcagggcgggggaaatggttgggcaacggctgggcactgccttaacttctctgaagcatcattaaatttgtgttcaaagtgaagattgaggaattgggcgcagtggctcatgcctatcattccagaactttaggaggctgaggagggaggattgcttgagcccaggagtttcaaaccagcctgagcaacatagcgagacctcatctctacaatttttttttaaaaaatagctgtgcatggtggcatgtgcctgtagtcccagctactcaggaggctgagacaggaggatcacttgagcccaggagttagagggtgcggtgagctatgatcacaccactgtactccagcccagacaacagagcaagaccttgtctataaaaaataaaaaaaaagaggctgggtgaggtggcttgcgcctgtaatcccagcacttcgggaggctgaggtgggcggatcacgaggtcaagagatcgagaccatcctggccaacatggtgaaaccccttctctactaaaaatacagaaattagctgggtgtggtggcacgcgcctgtagtcccagctacttgggaggctgaggcagaagaatcgcttgaacccaggaggcggagattgcagtgggccgagatcatgccactgcactccagcctggtgacagagtgagactccgtctcgaaaataaagtaaaataaaataaaaataaaataaaataagaaagaaaaatgtttattgtaaaataaaacagacagaaaaaaataagtcaaacacatgtatagcttatggagttattattacagccaccacccagaccaagaaatagaactttgccaatgtccctgttgtccctgggaagcacctcctgggtttccttctagtctgaactgccaccttccctgcaaaaatgaccctcacatgacttttacagtaacctcttttctgtctttctttatgtttttgtcagagttttttgaaccagagcaactccatcttgaataggggctgggtaaaatgaggctaagacttacttggctgtgttcccagatggtaagggcattctaagtcacaggatgagataggaggtcagcacaagatacaggttataaagaccttgctgataaaacaggtcgcaataaagaagccagccaaaacccaccaaatccaagatggcaatgagagtgacctctggtcgtcctcactgctacactcccaccagcgccatgacagtttacaaatgccatagcaacgcaggaagttaccctatatggtctaaaaagggaaggcatgaataatccaccccttgtttagcatgtcatcaagaaataactataaaaacgggcaattagcagcccttggggctgctcttgtctagggagttgccattctttattcctttactttcttaataaacttgcttttgctttgcactgtggactcgccctgaattctttcttgcacgagatccaagaaccctctcttggggtctagatcaggaccccctttctggtaacatctttcatcacctaagtgtgccttccaagacatatgatgtagttttgccattttaaaaaaatgcgatctatcgtttgagtctctttcaatccacaggtttcctcccacttcttttctttacaatttctctatcgaggaaccaaagccttttgatccacagagttcctactgtcgggattctgctgattgatactcttggtgcagttcaagatgttcttccctatttcctgcaaattggcagatggatccagaagttggatcacactcaccttctgtccttttggcaggaccagaggtgctgcattccttcgttaggaggcacataatatccggtttgcctctctttgtgtgatgctaacagctgttgcagcacaatgcttagctctgttaattcactaggggtttcaaaatggtgatattctaattctgtcacttcctcacatattaacttgagtacttttaaaaagagatgcttccagtcgtccaccatttgcttacccagtggtacagttcacatattaaacagaggcaggataaatgtgcgattctttcctcattatttacctgtttttcagagagtgaatttgttcctcatcctctgaaggtgacaatgttttaagtagtttcataaattgaagatttaaacatattttatgggtttttatccatcacaattatcgtctttactgatgctcaaatggctctatgtttggccagtgggagccccttgcagatggttcccgtgtccttttgatatgatcttttagtctctgatagcctccttgctatccagcatgacaagatgtccaggcttatcttacacatttcctgttctagacctgcaatcagccatttttccaagaagtcctggtttcaatcagtagagaatctatctatctatctatctatctatctatctatctatctatctatctatctatcttctatccatctatcatctatctgtttatctatctttttaaaaaagaaaaaatgtcaaaagagtgagaagacaagccacagactgcaagaaagtatttcaaaagatcccagcactttaggaggacaaggcaggtgaatcatctgaagtcaggagttcgggaccagcctggccaacatggtgaaaccccatctctactaaaaatacaaaaattagccgggcatggtggcatgtgcctgtaatctcagctatttgggaggctgaggcacgagaattgcttgaaccctggaggcagaggctacagtgagccgagatcccgccactgcactccagcctgggtgacagggtaaaactctgtctcaaaaaaaaatttttttttcaaaagatatatccaatagagaactgctaaccaaaatatacaaagaaatgagctatcaagccatgaaaagacatggaagaaacttaaatgcatattgctacgtatacggagccaatctgaaaatgctgcatactatatgattccaactctatgacattctggagaaggcaaaagtgtggagacagtaaaaaactcagtggttgccaggggtttgtggggagggaggaatgaatcagcagaacacagaggatatttagggcagtgcaactattctgtgcaatactgtaatgacggatgcatgtcattatatatttgtcgaaattcacagacaataagagtgaaccataatgtaaactatgaactttggttgatgttggtcaatgttggtacatcaattgcagcagacgtaccacaacgatctggagtactgatggtggaggaggctgtatgtgcctatgggaagggggtatatgggaactctctgtactgtccacttaattttactgtgaacctaaaactgctctaaaaataaattctattaagaaataaatgtaaaatgtctcatatgtctatattgattcttccaattcaaatgtagaattattgggtgctggtcgggcacagtggctcactcctgtaatcccagcactttgggaggttgaggagggaggatttcttgatcccaagagttctattgcgaccagcaaacatagcaaaatgtccatctctatgaaaaaaaaaattaagaattattggaggttgggtggagtgactcatgcctataatcccagtactttgggaagctgaggtaagagggctgcttgagcccgggagttcaagaccaacctgggcaacatagtgagactccatctctacctgaaaaaaaatttgtaaaggaattattggatgtttacttaaattctttcttattcctgaactcctttttctcaccaaaaaaaatcctagttctcaaaggcccaggagatgacagaattgaaatacacaagaattacttatttcctttatcccatattacacacacagcattcttagtataaaatgccaatactacttccatcaacatcattattgaaaacagttaaaatttttttattatgctttttttctgcatgcatttcttattctcttatccctcaatttataaataactgtactatatctatattgtcagagaatatagccattatatactatgcttttttaaaattttcacttattcttaattctgtaaattatatatttaatgttcaccaccttatgttgatgtctctctagacactttgtttctctgaagttcattctctagtgaattcctcaggaaggaatcatgggaacaatatttcctgaactgttacatactgataagtttgtttgtaccctttatacttgaaagtcagtttccctgaatataagatccttggctcacattttattttcttgagttatttaaatatgttactcaattttcttctggcacaaatgttgcagtcaaaaagttgatgataatccaatttccaatcccttacaaatcatgggctatttttgcttagacactcaaaagatttttcttttcctttgaagttctatcatttcactaaattcatgccttggtgttagtcattctgggtcagtactctcaggaacatggtgtgacttttcaatatgtagtttgaaaactttttatttctaaataacatagtacctttttgaactatagcttctagtatttgttctgatccctgctttgggtttttcttcagggaaccctgttctctgtatgttggatcctctttacccaacttcgagatttgtcactttctcctgaagcctttatatccttgctcatttcttagatttttaaaaatttccatttgtttcattttctgtttcttctgaggaattatctcttgtgtttattcactcttgcaatctttctaggttagtcttaatttctgaaacttttttcttttaaactcatttccccccctaaatttgttaatttctgagtttttctatttctgatttatgttgggtttttttgcatcttattttgtttaaataattgcttctagcttgtcttaaaacagtaggttatagttttttgttttgcaggcatatcttttggcatgtttttcattatctgtgaagatgttattctatttcttactctttttaaaaaaaaactgtatagagtaggactttgatctttgcctgctgctcatttttgtaaaggtgaaattaatttttctgaacttaaaaatggggttgagttcaagacagcttttataacttcacaaagctttctcttttgttgttttcatgcactgttaaaaaatatggcagcttattttattttatttttttagattcctggttcttataaaaatgtctctacttttatctggatactctgcttccttcccctctatcattcctgctctattcaattttgtttcctgtttcagcagtgtcttcttgatgtgcagccttgtcctggaaggatgacctggctggtcagtttcaagagttcacaggggctatgctactccatcctcttctcatctttttacatgaggccctttgtacttacacactaatggagtgagcaaaacccttcccgtttcagctcctgttgtgaagctggatctctgtactttccagtgaatgaatacctattgcctctttggggttactccttgtcttagtccattttatgttgctataacagaatattgagtaatttataaagaaaagaggtttatgtggctcatgattcttggggctggaaagttcaagatggagcagctgcatctgtgagggcctcatgctgcctcaactcttgcctaaaatggaagggaagtggggatgtgcacaaaaagatcacgtggcaagggggtaagcaagagggagagaaaccaaggaagccagactctttttgtcatcctgctctcattgtaactaatccattccctcatgagcaagaactcagtccctagagagggcattaatctactcatgactcaaacacctttcactgggccccacctcccaatgccaccacatagaggatccaatttcaacatgaattttggtggggacaaacaagtcacatccaaactgcagtttcctgttcttagagatgacaaacaccctgtttcttccctttgattccttctgtatgcatactaatactatgccagtttaataactgttagttacaaaataggcagtccctacccaccaatattttggtgttttaggggatgcattgcccactagttttattgtgagtgtttcccataggtttttggttttgctatctagtttgtctgttttttattagtggcatattcaaaatgatgcccctaacactgttgccatcttctcaaagacatcccaggaagaacttcaatattgacaatttaacatccttaaggaatgcgttgtaacaaccaaactggaggagaaaaagtatgtaaacagtagtttgcatagagtgtcttgtgctgattatgacactgtagcaggtcttgttgatggcttcccatatctgctcagcccacccgagctcaacctcaggaggcagttgtaatctcaagcacctacatctctcttcttctttaccagggactttccctggtaccatcaaagcttgccagcctgccttgtacttcctgagatcactcccaaacaagctgcctgaacccatgtgcttgtctcttgcctccttttgggggaacaagccaaggtagacaccaagttgtgttccaatagcctggcctgattcaagcatctctcatgtagtgtaatgatatggtttggctctgtgttcccacccaaatctcatgtcgaattgtaatccccactgtcggaggatgggcctggtaggaggtgactggatcatgggggtggtttctaatggtttagtaccatccccctagtgctgttttgtgatagagttttcatgagatccggttgtttaaaagtgtgtaacacctccctcttctctctcttcctcctgctcccaccaagtaagatgtgcctgcttcttcttccaccgtaattgtcagtttcctgaggcctccccagaagcagaagcctgtacaccctgcagacctgtgagctgttaaacctcttttctttatgaattacccattctcaggtagttctttatagcaatgtgagaacagactaatacatgccatctggttatgattttcaaaaatggaataatgttagctttatatatatatataaatgtgtgtgagtgtgtgtatgcatatatgtgtgtgtatatgtgtacatataaaatatatattatatatgtgcatatatatatatagagagagagagagagaaagagagagagagagatagggtctcactctgtcatccaggatggagagcagtgatgcaatcatagctcactgcagcctcaaaatcttgggctctagcaatcctcccacctcaccctcctgagtagctggaactactacaccacacctgactaatttttgtactttttgtagagacagggtctcactatgttgcccaagctgatctcaaactcctggcctcaagtgattgtcccatcttggcctcccaaaattctgggattacaggtacaagccactgtacctggcagcttaatatttttgatgacctttggtgagaaatctgtttagtctacataaattaaatgcttatctttccttgtctacaccctatttaattccctccagaggccctgattgattagtggcctgccccagacattgtctttcctaaatgctaggtttgttttccagaattcagcaatcttaccttctaattgcaggttctattttttttttttcttttctgagcacggaagtgagattgctttatctgtaggtgtcagggtatcctctgtgtttaacaaaatacgtgttgaatcattgtctccttggtttttatgactgagagtcttattataagtgaggccatgccaggtgagactaggtcagggcaaatgcgacctttgatgcctgattcccagcgcagacaactcagccaccttgttcatggctccatcccagtctgccttgcactctagttaaagtctgtctgtccctgtctgtctatctgtctgtctatctgtcttccagccttcctccttgagggtgagctgcattacccctttgcactgcccaccgcctgccccccacaacctgtcccttgcagttcctcagcaagaccttggctggacagtctgtgcctgaaggcagatggcccagacaccagtaaagggagctgggctttgcctccgagcctgcctccagctagggcttgggcttgggcaccatcttagcacatctgtaactggggctgagctggcccatgctgtgtccccctgaatcttgggacaaggcaccaatgcaggaacaggcgtgaagggtgcactcatcagagcccaagacatcactgcaacaagaatgcatacaggaagctctctctgaggacagggacgggggacggagtgtgacaggttccacactgcgatattcatggctgcctccgtgccatagggccccttgcatgatgtcaaaagaggagacttgcatcgtcttgttgttttcaagctaactttaaacacaactgacagcaagatgtctctggcacgaaagccaacagggaggcgactgtctctctgtttccatagctacagacaggacgccactgggcagtgctttcaactccagggcatcccaggctctgcctgagggatgaagtttcctgggtgctgggagaacccagccacaaaatggcagttgctggtctcagtttctgccccaaccaccttctatttttggtgagagagtatcatttttccagatgtccaagggtgtccattcagaacacacttctgcagccaggaatctgggaaagccggagatgtctccataaaccttctgcaggccatgccatctgctgaccttgacaccttctctgcactggaggacggcttagcaaagctggaaagggggtgtcccctgggagcctggctggctggctgtcacttgctgagccagggacagaaggagttgacagtacattttagtattacctgcttccaatttggaaaaaattttgtgcatctcggtttttccagtttctccttcacctctgtggacctgtaaaataaggatttgagcacatccctccaaagctaacttgtaaatttcctgttgcactgatatggttgggctgcttccccactcaaaatctcattttgaattgtaatctccataatccacacgtgtcaatggcaggaccaggtggaggtaattggctcatgggggcagtttccccccatgctgttctcgtgatagtgagcgagtctcacgagatctgacagttttataagcctctgatatttcccctgcttgcactcactccatcctgccgccctgtgaagaggtgccttccaccatgattgtaagtttcctgaagcctaccccgctatgcggaactgggaattaattaaacctttttcctttataaattaccccatcttgggtatttcttcatagcagggtgagaacggactaatacatgcgtcttcccgcaggagagtggatggcagaggcttaccttcaggggcccaggtcgggtgctggacatggggctggcattccaggtctgctgctctcggatgtccctctgaggggcatcctgcctgatgggtgggctccccctgatcttgtctccttggatgcatcatctgtgaggcttttgttttcagtcccagtggagagattcatactgccaggcactgtgtgggctcctgtgcgttgtgaaaataacgcttattcaggactgcctagggaagaaaggccatacctgctgctgtttttccatctctgctgtggccgcccacatggtttacggcacaacttgcctatgccaaaagggactgagaaaacctggaaacctaccaactacatttgggagatttttttttttttttttttttttttagaatgtctgtctcgggcaggcaataactagtaccgagcttggtgacccttttgctttctagctctgggggtgcagatctgagcctcctccagaatgcagtccccctagcctggctatgacactaccactggtgtgtccttgatgccacatttctaagcccatctgatcataaacctccctggggcagggaagtctcagagtgcacttcctcacctaacggcatgcctccagtggcatctgataaatgcttctgcagtgttcctggggaaacagttttattcatttcaaagtaatcctttctttcttctcaaaatctccaaacccaatccttaaaaccaagcattacatttagaatagaattcaagtttggattttaaaaaatgcttttaagtacgtcaggaactcagaagatacttaagcccaactttcctaccacatgatggaaagacacttggaaaggacagaagagttttgttgttgttgttgttgttgttttgagatgaagtcttgctctgttgcccaggctgtagtgcactggcatgacctcagctcactgcaacctccgcctccccagttcaagcgattctcctgcctcagcctccagagcagctgggactacaggtacgtgccaccatgcccggctaattttctgtatttttagtagagatggggtttcacagtgttagccaggatggtctcaatctcctgatctcgtgatctgcccgcctcagcctcccaattctgagattacaggtgtgagccatcgtgtccggccaggacaggagttttgaaaatgcactctgggctctgattctggaaaggagatcctgacttcagaggccctgctgccctactcagactccagaaggttgagtaaagttgagcaagctacagccactctgctctgggaagccagtagcaagtgctgagcctggacaatttgaactaagccagagagctctccaaattagggagcatttaaatagaagtgctgtttatttaggtcatatagtaatttccttattttaatcgctaccccagttaatgactaacaacatataaccaaacaaggttagcccagccaacttgactgaatagagagaactatttataatgagctcattcgtatctgaatgcagatagatgcacagaaggactccaatgttaatagaagtcaaaatccatttactgtacaaggtgggggagatgttccccctgcaagcctattcccactgcctttgactgacagtaaaaaagtaaacttcagcctggccgtgtatgacgtgagtgctgaattagtttggttccaattaaataggatttactgaattgtgacatggacatattctagaattttaaactctttaccccaaaagtaaaaagaagaatctctactatttctgtcaagagcgtcttagaccccctcctgcagttcatcatcaccttagacagtgtccttcgccccaccacgggcaggcctggagaaggagccccgccactggaggatcatccgtctcaaggatacttgggaactgaaggagtgaccaggagcaggcagtccagtggagatcttttttttttaattaagaagcatcaaaatgaacttgagtttggcaagacctcaatagagtagccaagctggctccaagcctggtttgcatggaggggctggacttggcttgggcatggctctgtcttgggctctggggtcagcaaagccccctgcaggcctgcccacctcaggctgtggggagcgcatcagggccaccaaggcagtgagtggtctgcagctctagggatggcgacccatcctagagagccaacagctgcccccagagtactcgaaccttattccctggttcctgccttcttccctcctgggtactcagcgcctctctgctctgttggattccccagtgtccttttaagaaagtctggcagggcatggtggctcatgcctatcatcccaacacttttgggaggccaagcaggaagatgactcaagcctaggagttcgagaccagcctaggtagcacagtgagaccctgtctctacagaaaataaaaaataaaaaattagttggccatggtggtgcacacctgtgttcccagctactcaggagaacgaggtgggaggaccctttgagcccaggagtttgaggttgcagtgagctagggtcatgccactgcactccagcctgggtgatagagtgagattctgtctcagaaaaataaagtctcccctttctttgcaagttagtcatagtttctgttgtgcactctctagaaaaccacatctgttcaccaactctcttctgtgttaaggactggtgtcactttagcctgccccagaaaaacttctctttaaagagaaactattcctttttttttttttttttttttcagacggagtcttgctctgttacccaggctggagtgcagtggcgccatctcagctcgctgcaacctccacctcctgggttcaagcaattctcctgcctcagcctccccagtagctgggattataggcgtgcaccatcacgcctggctaatttttgtgtttttagtagagatggggtttcaccatgttggccaggctggtgttgaactcctgaccttgtgatctgcccttctctgcctcccaaagtgctgggattacaggcgtgagccaccatacccagccaagagaaaccattcttataccctgaggaatgatggtgaaatttcgaaattgtgacaggtatatggggttcagggatgcccagaacccccagcaatgttgcttatgcaggggatacccacccaggcatattgacatcaggaaatttcagacaactcaactcagaaggaaacaaagtgaccctccagctccttgaaaacccaagaggtgacagaaaaggggaaaggagagaggaggaaaaggcctgggaaggaacattcatcccataaggtggccaagggataccttggctggaaatgagtctgggccacgttccctggtgaggaacttttaggaatcatggaattgcacagcaggccttcagatcctgggcccccatccctcatctttcgaatggggaggtcgaggcctggggagggaaggcatggcccggagcccacacaggccccagagagcagctgaggaaggcaggtccgttcccaggaggagtctcccgcctggatggcactctgatcagcacgtcactggcctgtctgtgtgttgaactgacttcaggaagccttggggtcacaatattgcagaggccattacagggccagatgttggacgtggaagcaaggccaggccacgtcataccctgaggtgactagtctgtgggtggctaagggcagtctggtcacaggactccaattcccaaaatgccatgacacccttcacctttcctctgcagggacagtctattgtctctgcatacagggaacaggctctgaggggttaggagacaagttcaagaccccctagctggcacctgggagagctgaagcagacctcctggcccatcccatcattcccttcttcctcccatgggatgcagggagacagatgaggtgttcccgacctgccagtatagatggctcccaaactcctctgtggaacaagtcttcttcttcttcttcttcttcctcgtcttcttcttcttcttcttcttcttcttcttcttcttcttcttcttcttcttcttcttcttcttcttcttcttcctcttcttctcctcctccttctttttcctcttcttcctcttcttttcttcttcttcttcttcttcctcttcttcctcttcttcctcctcttcctcctcttcctcctcttcttcctcttcttcctcttctcttcttcttcttcttcttcttcttcttcttcttcttcttctccttctccttctccttcttcttttttttttaatagagtctcacgctgtcacccaggctggagtgcagtggcacaatctcagctcactgcaacttctgcctcccagattcaagtgattctcctgcctcagcttcctgagtagctggggctacaggtgagcaccaccatgccctgctaacttttgtatttttagtagagatggggttttgctatgttggccaggctggtctcaaactcctagcctcaagtgatctgcccacctcagcctcccaaagtgctggaattacaggcatgagccaccatgcccagcctgttctggttcctctcatggcaacagatggaaggttcaggactcaagactcagtcttgccaaacacaatgtgagacagtctcagcttcccactgtgccaccttcagcctccagcccaaagacgggcaggaaccttcacttgcaggaacggcctgaggaaagggagcccagagccagtggaggcgggggtctgcctgcgtcccagagccaagccccctcctctttcctgtatccttgttgcagcaaacagattggcacctgaacctctctattagcccttctggggcttaggctgtgggcgcatggggccatgcactaaaaatgtctttcaccttagttgggatgcaaagagacaagtttgccactaatctttcggtggagacacacatatcaaaaatcgcaagtgagcacacaaggcttcctgcagggaattgcagccttcctgctcctccctcgctgcagaggctgagcctgactttcaaaaaagggcacgcagcccttggcaaatctcggaggaaaactcactgcgagttggtgccaggggcctcaggccccctttggggatttcccccatggcctctcaaaacaagaaggaagtctgagttaaaaatggaaaatggagagaatgtcaaaggaatgcagcgttattgattcctagtggtgtctgcctgaatattagatgcaaataagtgctaataagtacagttgggaaagctaatggaaaaaccatccttcccaggaggatcgcggcacacagatgcacagtgttgctgagatggcttggctcgctccactcactggtcacggcaaagcctgtatagatgcatcccagggaaataaagcctgtgtagacttgtcgcatggaagtactcatggtccagagccccctttccagctttgaggctgggctctggaaatgggagctcctattatctccccattgcagttaagtctctctttctctctccgtgtgtgtgcatgtgtgtgtgtgtgtgcatgcatttgccctctggagtgttcatggtactgaagagattctcttgaccatcaggcctctgtggcaaaagttgtgtgctctgttccaggcctaactgcagacagggagctcatgggcagctgcccagccaagctatggtcaggaccttgggtggcaagaggggctgcaagtgtggggtaaggggaccacagggacagggatggggtcattgcactgtgagctagtccggcaagtgactttttgctcactccactctcccctctctttgttcctaccttctctcctgctctgctccaacagctttgggatgtaggatgaataagggttccactgccctgtttttcctgacacttgagtccctggcccttgcactcagctcctccaatctgcacctgactgaggcggaggagggtgatttcagacacacacacacacacacacacacacacacattcccctcatgcgtgcagccagtggagtgtgcctgggtcccagcgcagccccaggcctgggtcactccgagcctaaagtcctggaaagggaaccccagaacaaagcctatcccagtttggaatcatcacacctgggccattctccagatgcgtggagtccagcaaaatggtggcatttttgcatctcaattcgctcatctgtaatacgggagtgataatgtctactctgttgctgcaagaattaaaggaagaccatgatctctttgtcatgcttctatttatcttcttatctgtcctggtctatttttggatgctctgagcttacctggggcattaaggaggcctcatggccctggggctgaggggctccctggccgtccccaggagtggctctgctctccgcctggtgtcccccactctggtcagtcaagacccatgggcccagctcactccccaattccatcactcactctaggtcagctggtaggagtcaggccaaccagccagcaggtaccattagagaggagagagtaagggtctttcactttattaaaggcttctctgctgttgtttgaaaatactgagtgtcccttcaagactaacaggtgactgtgtgcacagtttcctccagctcctgtgagaaagcagttgccccccttcccaaggcctgcttgtcccctgcaggctggggctgcctcttcttaggaagaacaaggacccgaatccagggccccgtgttcctgtccctactctgtcccggtgctgtgtggccgtgggccggttccaccctccacgctgttttcccgagtgtgtatgaagagggtcggttggccccgctctcaggctggtgacccgacacaaacttccaggatgaagtcctgaagggagcacctgttcgcagggcactttcagcagaatctagagccccagggatttgaggatggatgcggacacccgggcctgaggcagctcgcggccttgaccgaattccacgcgagctgaagcccagggatatcccagaatcttcctcaggatcaatcttccgcctttcaccggccctgcgcccccgcagcatcgggtcctgggcgcgcgcccctgccccgctgtggtcaaggcccgccccggtgacgcctggtccttttcccgggttggcgccgcgtgcgacccaccgaggcagtggcagcactggccgcggtctggagcctagcgtcaggccggagtccggctctcctgaaccgggagaccggcgcagccccagccacgaccgctcccacccccgcggccgccggaccgcgcccagcagcgactctttctgagagcgctgccagaggggccgcgggagccgcagagcgcgcgtgggcgcggcgcccgcgagcccccgggagggccgagtgcatcgctggagcgatccccgcccggcccggccaccgccgtagccgccaccacggcggggcggggcacgggccgggggcggggcgccgggcgggcgcggcgctatttccagcctcgccggaggcttcgctctcacttcgctgggagccttcccggcgcgcaagccggatccggcagtgctgcggggaggagagaggacgaggcggcggcggcagcaggaggtgggggaccgatcgcgccgggggccgaagaggaacgccgccccgcgccctctcgctccccgcacgctccggctgccggccccacgctgctcgcccacagatcgcactgggttccgcttggagcgggcggaggcaccgggcccgagctgggtcggaggtcctctccgccgcctgcgcgccccaagcagaggatccgccgcggagaaccgctcccggactggaggcgcccgcggcctcgggtgcgtccgctgcgccaggtaagtggctgcgcccctgccccacccctgttcccgccctgcgcaggctcctggcctgcagagacgccaggaaggggtcccgagcgggccccggactgcaccgctcgccatccccgccaccgcacgcgaatgggagtccgaagctgcgggcggaggtgggcgcgcggggctcgggtctggttgcactttggggaccggccccggtagcgggaactttaattagactttctctccttggatctcactcgctgccgcgcttctgggaactgccgtccctcgggccctcttggtccctgcggactcccgctccgcctcctggccctcggtgctgcccgcggggaggcggcgtcgggcgctgagcagcgagcgccgagggccaggcaggagcgctcggggcgctggggcttcctggcgcgctcggagccggggctccggacgggttgcggcgggcagagactatgggggaagtttaagtggccttggcttcctacccagcggctccgtcgcgcgcgtccccgacccgcaactctccagggcaccggcctgtgagtgctggaggcgagtgtgcgtgcgtcagcgatggtgtgaaggtgtgtgcgtgcgtgtgtcgggagtgcgggagtcggagcctggggcggctccagggggcggggaaatgatccgtttggccgcgggaccgagccgagctctgacggcggctgcaactccggctaccgactctgcagacccgctctggcctcgctggaggccagccgggccaggagggcgatcacgggttttggcagtgcccgatgctggggcttgggtctgatgtgaccccgattccttctccagtgcgggactcccgccgccctaactttcgcgtacatcttgtctccaggcccgcgaccccgacccggagttgaagcggctgcggcgccctcggctgtgggcgctgctgcccggctgtctgttttaacccagaagtaggcgccgatcctggggctctctgtcctgcagtcgtctccggcgtcccagaggactctgcgtccctgggccactcccgctggctcaggagccgtgatcagctccgttaaggggaacgcgcgtcccggcccctctccatctgcttggcgcgatctggcgcagcagcagagcacgtgggagaggcgttgggtgcagggaggtagtagctgctttggagtggatggtggagaggggcgggggacagaggggtaagaggcagatcaacccccttttatttcccaccgccgcccaaggcccccaggagctacaataccaagcccactttcctgggtaacctttctcttctgagttcaccttgacccttgcctacctgtggggaagtctttccctaagtcctgccctaggacagggcacccgtggagcaggtgtggcagagcccttaacattttccagctgtcatgacctttcctgcccaccctgtgccctgtcccaaaggcaaggcagacaggccacaggaaggacactcatcccagcaggagatcctcttttaattttaatcaggacaccccaagcacagaaggcggcgtgggagttcattcaggagcgttcagcagactggcctctgtgaagtgacccacgggaggaataacattggaaccctgaagagagggacctcttgagggtctgaatgttggttccagtgggactggctgatcaattatccaatagcatttgaacacagaaaaacctcaaagccggaacctgacccattgcctggcccagtcgccctgggacacacaaacagtgcagctcatttatttacttatttatttattaacctggaatcagactcggcaagagtgaattatgtttcccgggtattgatttttaaaaagaccccaaattaaaaagtcaaggctttcttaaagcaaggtcaaggattaattatttatcgagaggcatccatcaggcagcgtgggggctcatttataaattgcctgagcaggcaaaatgagcatcttttgattttccttggctccagttgggagaggagagcaggctcgtctgacctcctgggcttggtagaacatccccctcggactgtaaccgacgacagaggatgctttgtaactcagcctgctgttagagatgcctttataatcttgtagccagaatatcacttgggaaatttcatgcatatttgctgtgtttccataatgaacatttactgattacagggtatccagggaatttcattttttaaacatttattcaaatctctgtttatgtaagctaataagtctgggaaagttcaaaaacgacttttttgccgtatggttgttgagaaagtgtgtctggtgggctactctcagaatttgtcttcagttctcttaaaaaggggagagtcagatttgcctgattggaaacctcgcgcaggctgctcccctgctctgagctctgagttcctgccagaggcagcctgataggctttttgtggttttgctgatggaagagaggaaggggagctttgatcattgctgatgcgtctggctggagaaatttttagtgagtgcggctgtgcttgtaggggctgatggggaaggtgtggcccaagctgaggtccctggctgatgtccccatctcctgcctgctgcctggcctggaatctgagatccctgtcttagctacatctgctgctttgcagcttggaaaaacctccctccctgatttactggtgcgtggcagccacactggagaaacgtggggcagcggggaacctgtgagcaggaaagaggacacaggattatggcagctttctttctttcttttttttttttttgagataaagtttcactcttgttgcccaggctagagtgcaatgttgcgatctctgtttgccacaagctctgcctcctgggttcaagcaattctcctgcctcagcctcccgagtagctgggattacaggcatgcgccaccactcccggctaattttgtatttagtagagacagggtttcaccatattggccaggatggtctcgatctcctgacctcgtgatccgcccaccttggcctcccagagtgttgggattacaggcgtgagctaccgcgccccgcatggctgctctttagtgagcaaccgtggcaattagagccgataaacaccatgtggaatgagtggccagcctttcagctaaccagaaggtgacgagttataaactggagatttatatagtgctggcccaaggagatcaatgtgacccggcagtggcacagcaaaaaatgaaataaataagtaaatatgtttttaaaagatcggccaggcacggtggctcacgcctgtaatcccagcactttgggaggccgaggtgggtggatcacttgaggtcaggagtttgagaccagcctgacctacgtggtgaaacccagtctctactaaaaagacaaaaattagccgggcatggtggtgctcacctgtagtcccagctactcaggaggctgaggcaggagaatcacttgaacctgggagacagaagttgcagtgagccgagatcatgcccctgcactccagcctaggcgacaaagcgagactgtctcaaaataaatttttttttttaaattgaggttggtgcctggatgtagatatggcatcagtgtcctgcaacctcagaaagttggctgggcatgagcaatctgcatggtgacagcgtggtgacagtaggctgtttggtgctgtctttggcgccatattcagggctcatctgactccagagcggctgtgttccctccagaggaaacccacggacccagacaacccggggacagagctgcattagctcaggtgccagaggatgcggcagacgccatctcatttcttatcagctggaggatgtgtgaccctgtggtcagtaaatcagcatggcagatcgtgaggcttacaaattggtcatggaaaaaagttgtgacttttaccctgtacaaaactacctgtcatttgtgatgtggtgttctagcctgcactggctggattcattcccggacccttagaaactcagcaatgcagcctgggccaccgagagactggggaagcctccgtgcaggtgggttgacaccaagaagcagccctggccccattgccaaagccaccttttaggaagtcagagagtatctgtgcaataatttggatgtttgtcccctgtgaatcttaccttgaaatgtgatccccagtgttagaggtggggcctggtgggaggtaggtcatgggggtggcccctttatgaatagattaatgctattgtgaggcagggagtgagttcttgctctattagttcccacaagagctggttgttaaaaagagcctagcacctaccccctacctctgtgatctcggcacacaccggctcctcttctccttccattttaagtggaagggcacgaggccctcaccagatgcaaatgcaggtgccatgcttcttgtacaggctgcagaattgtgagccaaataagccgctttttttttccttttttttttttttttctttttagagacagagtctcgctctattgcccaggctggagtacagtggtgctatcataactcactgcagccttgaacttccaggctcaaacaatcctcctgcttcagcctcttgagtagctgggactacagatgcacaccaccatgtccattaatttttaatttttttttatagagatggggtctccctatgttgtccaagctcatcttgaacttcttgcctcaagcaatccttctgcctcagtctcctaaagtgctgggattgcagatgtgagccagcatgcctgtcctctttttttggggggggggcgggtggggtgacggagtctcgctctgttacccagcctggagtgtacagtggtgtgatctcggctcactgcaacctctgtctcccaggttcaagcagtcctcccacctcagcctcccaagtagctaggattacaggcatgcaccaccatgcccagctaatttttttttttttttaatatttttagtagagatggggtttcaccatgttggcctggctggtctcgaactcctgacctcaagtgatctgcccatctcgggctcccaaagtgctgggtttataggcgtgagccagcacgcccgaccctttttctttatatattacctagccttagggattcctttacagcaacagaaatggactaagacagtccgtatgcaggcctggggctgggggcagcagacacagctgtcctcccaggttggtggcctgggtcttacatccgcactccgcacgtagaacaccatacatttctgggaaatagtatttcttggtgctggtgactgagggcaagatgccctttccctgccaagccatgaccagtgttggccctgatgagtgacatttatttgaactaaattagaatcatcaacgttgaaacctggagccaaatgattctcagtcccacactcctggtgccaggcctgttgtcactgtccctcgccctgcccctgcatgtttatggagcaggtattaggtgtcttgcactgtaccaggccctgtggacatgaggtgagcaaagctaagggtggtccctgcccttgtgagttagatggagaccctcctcatttattcctcattcactaattcattttctgccagacaaagacattaataaaaaaaatgactaatgtgtgattctaggctgtgataaggatataaagaatataaggaaataaacactcaggtactatgagacctaccaaagagcaatctgacctgcactgagaggttaggaggacttctcggaggaggtggcccttcagctgcggtctgaaggaggagtgggaactaagcagggttggtggggagtgtgggaggaaaggatggggagagagaatccagcatgccaggcaggcacaggcaagagcatgcaaagggcttcctgtggagggaatgtgtgagagggcatgaggagcaccatctgggagctgtgggaaggcccatgtcgccagcagagtgaagaagcaggtgacatgtggctggagacccatctgtgcagggtcttcacaaccagggagggacttgggactttatcctatgaactgctgcagagtaggaagaccagcgaggctggagctgcaggaatcttgcagaaagaccactgtggccttaaataggagtgaatgggcttcccctcagacattggtctggtccatcaggctctgtctcctggagccggggtggttgagcctaatgtgcaatggagtctgtctacactggttgaaaccagtgtgtgatgtaggcagtgcatctacgctggttgaaactagtgggcggtgtaggcggtgcgtctacgctggttgagctagtgcacaaagcaggcactgtaacactggttgagcccctagttcatgatgcaggccatctgtttatactggtggatctcagcacaccattcacgccatctgtctacactggtcgaaccagtgcattctgcaagtcattctgtctaaactggtacctggctggattaggtgtgggaggggatgtggtaaggagtggtcaggatggttacccatgggacgctattgggagttgtctactccctgagacagggctgccccctggagtgctaagcacctgtccactctggctgagtcacatcctcctaggactgggtggccaggctgctggttgtgtggccccactgtgctctgagcccttggttcttccactgccttcctctcttgtctgctcaccattcagccctagcacgtccagggcactcggcaagtgacagcccagtgcccatagctccatggtggggacaagctgctcgacggccagacccatggtcctggcccaacttttgcctcctgactcattgaggatgggcctccactgggggaatggagctgaccacccactgtggctcggatgcccacttccctccggagctgagtgctgcccagtggtggtctccatgtgtgtttcatccacttagcttcctggacccctagagttccttcacctgccacctgcctgatgtaacctggcagctggctggcacctgccccagaaagaatcctctcttatacccttttcttgctctcagccctctctccttttcctcctccccaagggagccagtctctacctgttgcaccctctgggaggggctctgcccaaggctgggagctccgcagtgccctctgatgttggtgaatttcctgtggctgtctgcagcacaggtcgggccctgggttccctgcagacatcggccctatctaccaggctctgtcctccagagctggggagcagggaagcaggtctgtgagtcaccccatttcccgttgtgcccatgctgctggctgcaggccctgagctgagtggccaccgagctgcaggcaacagcccaggtcgctgtcaccttgtcctcactgtctgggcctgagccagctcctccctgactgggccagactcggggacaggagggaagagagctaagcagaggatgctaggagctgcacattactccttggtcccctaggccccctcccagggctgattccttgcccagagggcggcctctccagatgagccttcctgggctggcctggccactccattctgtctgttgccttcaccactgtggacccctggacatgcccagatgcttatcagtgggaagctgacacaggagagcccctctgccagcagcccctagcccgggcacagactgactcgcacttggcagacaagtcgtccccaccttcgaggctgcctttttgggggctgactcatctcttgggacaagactcatcagcctaggcttgcagcactgagaccctcctccagccttgagctgcaggagctttgcttcctgtgccgcatccaggcacccagcaaacactgaccctgacctgccatatgcagagcctcgtacacctggccctggagaagttgagcaaacacaagcaggttacagtgttggtgcagatgctgctctttctggttgtgttggccaggaggagctcggcatggagaaggtactgagcgattgcttgtgggcaggcagagtgcattaaactgtgcagtctgtctacttcagcatagccggtgcgtggggaaggcagtctgtctacactggctgggccagtgtgtggtgcaggcagtctgtctacactggtggggccagtgcatggggcaggcagtccgcctacactgacggagccagcacgtgggtcaggcagtctgtccacactggtggggccagtgcgtggggaaggcagtctgtctacactggctgggccagtgtgtggtgcaggcagtctgtctacactggtggggccagtgcatggggcaagcagtccgtctacgatgacggagccagcacgtgggtcaggcagtctgtctacactggtggggccagtgcgtggtacaggcagtctgtctaactgacggagccagtgcatgggtcaggcagtctatctacactggctaagacagagtgtggggcaggcagtctgtctacacttggttgagtctagggcatgagcactagaacattccatgtagtctgtgcttgccccactctctgtggggtctttgcacaaggttcagagctctcaaactctgtagattcagtggcttttcctgtggctgagctcagcctgggtccgggcttcccctcagatgttggccacgtccatcaggctctgtctcccagagctggggtggtcaagcccagtgtgcaatgcagtctgtctacactagttggaatcagtatgtgatataggcaggctgtctacactgattgagccagtgcaaaaagccggcgctgtctatgctggttgggctcagcatgtgattcagcaatctgcccacacaggttgagctggggcagccagcctctctctggcttgctgaggccagagctcttggttctttctgacaccttccctttttcctatgtgattctttctcccgggaatattcctccttacacctcctatagacatctgggtctgatttgattctgacttccaaagactcagctttcgtgtgtctgtttgaatctccttggcagaggctgacatgggctgggagtggcactgggatcgcacgtggatttcccctccctgttgctgtgcctggggctgggcctgtgctggtgcagaggctacctgctgtcagtggtcatcactaccttgccatccctcgcgacagccactcacacgcctctttctcacaaaagtcatttagcgaggattaccaccttggtgtgcgtggtaaattgcatttctcctggttggggccatcttgctgtttcctgcttagatttggggcctcatgaggtttggcctcatctgcaaatttaatttcatgaccattcatccctgtgaaagcacaatctatgcctattatttcactcttcttgattccctcttccacgagttaatgtgtcagcgcacagccatggcaaccactccccgccctccctccaccccaggcagccacctctaggttgcggctgaagctgggacctggagtcagaccacctgggttcaatcctagccttaccactcggtcactgtgtgggctagggacccagtttcctcatccacaaaacggggttaacaagagaatccacctcctagagctgttgtgcctaagagtccacaatcagtggcagctgctactgctattattactattattattactactcccgttttatcttgggtgtcaggaagcatattggtcaagggccttgcctggtgatgtgacagaggcttagggggcaggcagccccactggccagtgtcccctcaagttctgctttttcttttcttgtctctctctctctctttttttttttttttttccagacagggtctccctctgtcacccaggctggagtgcagtggtgcgatctcagctcacagcaacctccatcccccgggctcaagtaatcctcccagctcagcctcccgagtagctggaactacaagctcccatcgccatgcctggctattgttgtttgtttgttttttggtatttttagtagagaaaaggttttgtcatgttgcctagtctagtcttgaactcctgagctcaagccatccacctgcctcggcctcccaaagtgctgggattacaggtgtgagctgccacacccagccaaatcatttttttctaagcagtttgctaatgatgtcttcttcttgtcctgcatgcaccattgtacatatttaagccttttattccaagtgtagtacacatacagaaaagcgaacagatcctacgtatacaatgcagtgaatgtctgcaaactgagtgtgctgtgtacccagcactggagcagggatcagaacatgaccaggaccccagaacccccccatgacctcttccagtcattcccctccaccacagaaaaccgctccccttacttctaacgatatggattggttttccttgtgtgtgtgtgtgtgtgtgtgtgtatgtgtgtgtgtttgagatacagtctcactctatcgcccaggctgaagtgtagtggtgcaatctcggctcactgcaacctccgcctcctgggttaaagtgatcctcctgcctcagcctcccgagtagctgggactacaggtgcatgccaccacacctggctaatttttgtgcctcagcctccctagtagctgggattacagacacgcaccaccacacccagctaatttttgtatttttagtagagacggggtttcaccatgttggccaggctggtcttgaactcctgacctcaggtgatccacccgcctcggtctcccaaagtgctgggattacaggcattagccaccacacctggccccttgtttttaaacttaatagaaatggaatcatgcagtatgtatgctcccatgtctgggtcagcatctggtttctgagattcatccatgttgttttgagttgtgttatttgttccttcctctttgtacaggattccatcatgtgggtagaccctaatttattttccagtttcttgttgattggcatttgggttagagtttttggcttttatggacagtattgctatggatattcttgtgtgtgtctcttagtgatatgtacacattttttccttttttagagacaggatcttgctctgtcatctaggccagagtgcagtggcgcaatcacagctcactgcagccttgaactcctgggctcatgccagcctcccgcctcagcctcccaagtagctgggaccacaggtgtgcaccaccatgctggctaattttttatttttatttttgtagagatgggggggtctcactttgttgcccaggctggtcctgaactcctgagctcaagtgatcctcctgccttggcctcccaaagtgttgggattacaggtgtgtgtcatcatgtccagttcctgcacattcctgatgtacttagaagagaattgttgggccccagggtgcaggtactgttgaacagttttctttttcgtgtgtgtgtgtgtgtgtgtgtgtgtgtgtgtgtgtgtgtttaagacaagatctcactctgttgcccaggttgtagggtagtgacgtgatcatggctcacggcagccttgacctcccacgttcaggtggtcctcctgcttcagcctcccaagtaactgggaccacaggtgtgcaccaccaccactcccagctttttgttttgttttgttttgttttggtattttttgtagagacagggtttccccatgttgtccaggctggtctcgaactcctgggcttaagcgatcctcccgccttggcctcccaaagtcctgggattacaggcatgagccaccactcccgactccattgctggactgttttctaaaggggtcgtactgatgtttccacctcctcaccagtatatgcatgagtgttccgtacgtaactctcccactccacgtcctgtccaatacttggcattgtgagtttttcccattttagccattctatgagtatgccgaggtatcacaccgtggttttaattttatttctcagatgacgaatgcagttcatttttttaccaaggatattttggacctggaaacattattcaacaaatttgaaaatttcctttcgtccccaaattgtagaactcacttccatccccacattgtggaaacgtctggcagtgcttctgatttcttctgggcgggtttgaatctcccaggctggaagccaagggatggagtagacaagagtttctctggatgagtctggggaactggccacctgccccagaatcacgtgggttgctggtcagagatgcaggtgctgagccctggcccagccccggactcatcagacagcccttgacccattggtccttctagggctgttttttttttttcttgtcacgaaaccaaaaaaaaaaaaaaaaaaaaaaaagcatggatgctgccctttctgtcatgtccacggctgtgtcacaatgcccagaatagtcctgcacagggcagacctgctgggttgaagggtttcccattgttgtctccatcctctcccaccccagctgacttggcggggactcgttagtcaactgggctgccgtggtgagggctctggaagttggtttctcgctcgctggggggtgtcccatgtctgaatgacctcctccttctccaaagccaacttccaacagagctgcagccgtgcccccagcagccttgctcacccccagtcctctaggcactggccatttgagagcctccttgggcgacctcctccctgatgatgcatgtgttattgggtccctctggagaagcttaggagccccctgatcccccgaaaagaacagcaatccatccctgcaccatgcggccccctgagcttttccaacaccgtcttttcatagatgatgtgcccttggtcaaactaaggcagaagggccattcctgtcatcagctgctccactcctgcccctcagcgttttcatgaagaccgtggtgaagcctcctttctttgggtgtggcttgcccctccctcctcaagtttagcagaactactgggaaagcaggatggcctgggggaggagagctctgggtcagaccctttgggtggttttgagacccagtcactgccacaagaggagggaggcagtttcgtatacacaaccctgacttagctagcagggagggagggcaagggatcctagctgggattcctcctgtaatgccagctctttgggaggcccaggcaggaggatctcttgagcccagaagttggaggctgcagtgagttatgatggcacctcctccacagaggagggaggcccaggctaggcctcaaagatgggtgggggggtgacaacacctcatggaccactcagcatgagctccgtccctgagggccagcagtggaaaaaatgcgggcttagttccccggagatactgcggtccagttgacccaccacacaagggcataaggcgatggtcagggttcactggagagctatggaaggcttcttggaggaggcgagctggggattgcttacctcaaaggccaggggtgagaactttatcttggtacagtggaaattctctccaagctttgggactacagtgcatggacagtgtgagccaactaccgtttgctttaaaatagggcaaaaatgaatccatggcgcacacattgtttatgcgatgtggaggcgggcgcgcaaagacggaagagctaaaagcagtttgggaaaaacaacacttttttttttttggtgggaagacagattagagaggtttatgcttttctgtgataactaatatgaaaggtttatcaaagttaaaaaaaaaaaaaaaacctcttgacgctttctccaaaattgatctgaagacttggcagatttgaggaatcattcagtaacgttttacgagtcgatgctaatttgatgcggcagacctgtgcatcgcgccaatttactgccaaaccaacattaagcacggacctctcgcgcaaggtttataggcagacagctcataaagatgcatgcttgacaagtattctgcttctcttaggatgtggaatatgaagtgtttatcaaaaaccacctaaatcgcccttgccttgactcgtaaacaacctggcggcttcaggcttgggccctatgcagtatttcacgtctcaccactacgggtcctggtatgtgcgtgagtgcctgagtctttgtctccagaagccacagttagaggtagaagtgttacaggaaaggggtcccgatccagaccccaagagagggttcttgggtctcgcacaagaaaaaattcgggcaagtacataccgtaaagtgaaagcaagtttattaagaaagtagtccgggcgcagtggctcacgcctgtaatcccagcactttcagaggccaaggcgggcggatcacctgagctcaggagttcgagacgagcccggctaacatggtgaaaccccatctctactaaaaatacaaaaattagccgggcatgggggctggcgcctataatcccagctactgaggagactgaggcaggagaatcgcttgaacccgggaggcgaaggttgcagtgagccgagatcgcgccattgcactccagcctgggcaacaagagcgaaactcagtctcaaaaaagaaagaaagtaaaggaataaaagaatggctactccatagacacagcagcccccaaccactgctggttgcccatttttatggttatttcttgatgatacgcaaaacaagggatggattgttcatgcctcccctttttagaccatagagggtaacttcctgatgttgccatggcatttgtaaactgtcatggtgcttgcgggattgtagctgtgaggtcgaccagaggtcactctcatcaccatcttggttttggtagcttttggctggcttctttactgcaacctgtttcatcagcaatgtctttatgacctgtatcttgtgctgacctcctatctcatcctgtgacttggaatgccttgaccatctgggaatgcagcccagtaggtctcagcctcattttacccagcccctattcaagatggagttgctctggctcacacgcctctgacagaaggatccctgtggggtgtgagatacctaaagaaaggttcgctttcttttttttttttttttgagacggagtctcgctctgtcacccaggctggagtgcagtggcgggatctcagctcactgcaagccccgccttctgggttcacgccattctcctgcctcagccttcccagcagctgggactacaggcgcacgctgccacacccggctaatttttggtatttttagtagagacgatgtttcaccctgttagccaggatggtctcgatctcatgaccttgtgatctgcctgcctcggcctcccaaagtgctgggattacaggcgtgagccaccgtgcccagtcgaaagtgaacctttcactgggtgtggtggctcacgcctgtaatcccagctctttgggaggcccaggcaggaggatcgcttgagtccagaagttcgaggctgcaatgagctatgatggcaccactggactccagcctgagcaagaccttatctcttaagaaaaaaaaaaaaaaaaagaaaggtcccaaagtgtaggatctgaagcagcatgccccctcttccaggaaggctcaaacatccccttcctaacagattctccaaggctgccctaaaaggaaataaaggctgcgcccaaatgagatctttggccccaaggagatagatttcttgctctcatgtttgtttcctgggcgactgtgtgatggatcttccctgcatagctctctccatccaaatatgctgtcagagcctcaccaatttcaggatatcactcgagctttgttttgctggtcggaaagtgtttaacaataaaaattatcaaaactcctgtctttcaccaccgaacaccaccgctgacgttttcctcaaaggaaaagtggacttgtgtggcattattctactgtatctgtgcctccagcccctccagcctcctcccatggcagtgttaattacccaagcttaaacgaagaaggttgcaggtgggggcaaagcatgcagaccgctgtcagcacaaagcctcgtgggttttcgcaaggggaaatttgatctcgggcaaatgtcaaggcgtttttgaaatctgtgttatgatatcagctcattgccagtgtaggacttcatctgaatttcataaatattgtatgggactccctcattgccaccttggccggccacagtgcacaacagccacccctcagcacacacacgctctccatagcaattgcaatctatcgctgagttgtcatgaaaagccaattggtgatatttcaatcacaatgttcttgtaaccaattccattcaaattctgtcggaaagggagttaaggcttcatcctgctgctgggagaatgatatgctaaatgtagcttcctggggccctggcagccagccagggctttgtaatttatagttcaccttcgtggttctccaagtgaccttggaacctgcatgctggtggattttttaggttcacacgttgtcctccatcccctggtgagattgctccccaagtgagtgctccctggtccatcaggcaagagcttgagggagaggatgtggatggggggcacccagagaatgcatggctggggatcagaagatttcttgttgctgctgacctttcttctaaaattgctgtcagccaggaaacagtcaaatattgtgcttaaaggtggcttgcaggtgacaggagcctctctccagtcctagcacacagcaggtgatcctgaccaaaaaaaaaaaaaaaaaaaaaaagaggaggtacaatatgcgattacgttcatcagctatttttggctgaggaataaacaaaatggcccaaactgctgccattcgagattctagcaggggagtggcatgtagaaaagattaatgtacagttaaaacccgtgtacgggtaaattacagggtgacagctatctaatgcaaacactgcagacgtgtaattaagaggagttacagcgctcgaggatgaatttgctgagggaagtgctagggtgctgtctggagcccaggggcaggggcatggcactgggatggtgtgggggctgcagaggtggccaggaggagcctctcagcatcggggcagccttgtaaccataacaggtccattgcctgatgcacgcagcaagtcaatgtgctaagatgccaggttgcggcagaaaaagaggattaatggtaaggtcatggaacgaggagatggcagacaacctcaaatccatctccctggggaatgtggggttaggatttgtaagttttggagtgggtgaagtgtggagatcgttgatgggtggaagagtgcagggtaaagtcttgggaccgggagaggaagaagctgtgttctcaggctgatccccctcctctgtagggggtcctcaaactgttgggggcaatttggggtcttttcaacatcttaagtgaacaaaaaccttatgattctaaaatcaggggtcctgtctatagggacaatggagaagcaaatcaaatttttttttttttttttgagacagagtctcactctgtctcccaggctggagtgcagtggcgcgatctcggcttactgcaacctccacctcccaggttcaagtgattctctggcctcagcctcccaagtagctgggactacaggcatgcgccaccatgcctggctaatttttttttgtagttttagtagagacagggtttcaccatgctggccaggctagtctcgaactcctgacctcgtgatccgcccacctcggcttcccaaagtgctggaattacaggcgtaagccactgcgcccagcaaagcaaatcaattcttacaccattttatgaccctaatgtcagaaatcttacctataggagcaatgggggtgaccacggccaggatctagcaccacgtgactccttgccacaaggaactgggccagagtgcagcctgattaatgcttaattataactatatttctgtccagaacctagcgtgcaattcttgccaaccctgtggggacagtttcaatctgggatgtggtggaagccatggctcctttgggtggctcagcccacctctccaggtctgtccgttcctgttccaagcttccagccctttctggagctgccctggtctccccgacctctcactcacctttggctctgtggccttgagagcccatggatgtcttttatgtttttaatttctcctgctttgtcagctttctaaggaatatattacattatgtggaagttggatgctaacaagatttgtatgaataaattagactcttaacttttttatgttattacaaaattgaaatggactctaatgacagtcggaattaatgttctgttgccaataaatgccggggatgtgactgaatcttcagcgcactctcctcttgcatctctggcccttcctgggtggtcttgcccaagaaggaacctccctcctccttccagcgaagtggggtgctccacgacgcctccctgctggcccctgggtgatggccaaggtgctgctctgcccaggtgtgggggctgctgggaatatctgctgctgatgctcccaggggcgccccgggatgggaactgccctgggccccagggagctccttgcccaaagtcacaccccatcccaccgccagggactgctactgctgtgggatcacaaaggcccagccccttgtctccatttgggactgccctgaaggtccctcccagcaccagagcacctatgggatgggctgagtcctcagctgagaggcactgctgtcggcttctctctctgcctgctcctgccctcctcagctcctcgcaggtggctgtcccgagagcccttccctacaaacctgtctgcaccgtccatcccagagcatccaggcaactcagcccaagatcctggctcttagggacttacctgttcctaaacccatggtaggctgggtgagtcctcttctgccaggatcagagtcctcggggaacaggattgctgtttctggcccgagaccccttcttgaggtcaggactgggggtgaggcactgaccagcttctcagtctcagcctagatctccgccccaccaccccctgggcagggtttgaggagcagcagggttaagggctcccccagatctgagctgccacacctcagcttgcggtgaggagttttctgcaaggaaacttctatctccccaggggggcaaggtggcacaccggctggggattggtggtgtattggaactggttcccatagctgaagatggaagggaagaagggggctggtaaagtagggagaaggagcctcagatagcccagaaatgagggggttctggacagcccagggtggaaaatttagctacccttggagtcaggcctcagggcaaaggaggggtatggtctgggatgtcgggggcggtgtgtggggaggggggacctgctgctttggaagggggcagtgggactcccgctgtcatcgcagaaagggatgagggtttccagggtggccaggtattcacatattcaagaacacaggtccatttttatatgaaatcgcttcccctctgaagtctggagactaattcagaatttaaaaccaaagtcctacgctgaccaaaccatatgtctgtatattactttggcctctgggcctgaagaatttggagtccagaacttcactgacaaggtggatgatttccgcctggaggatgagggcctggggcctagtgtctcaccagagccctggaaagggacaggaaccaccaagaccacaggccatggctgcagggctgtggggctcagcacccactgactgtggcctttgttctgggacatccctgtctgctgggaaggggccaaagccctcacctctgggactgcagatgggtgggcgactggctgggctctgtgtgcctctggagtctggcccactcccccaggaccccgtggatgagtgggcagcagagggcccccccccactccacctcccacttccaaggaatctgacctcagcattctagcttccaccttcataagtcttttttttttctttttttctgagatagggtctctgtcgcccaggctggagcgcagtggcacgatctcggctctttgcaacctctgcctcctgggttcaagcaattcttgtgcctcagcctccctagtagctgggattacagacacgcaccaccacactcggctgagttttgtatttttagtggagatggggtttcaccatgttggccaggctggtcttgaactcctgacctcaagtgatctgcctgcctcagcctcccaaagtgctgggattacaggcgtgagccactgcgcccagccaggagtcttaaagattccctgcggaaatgcctttgcaagagcaaaaagaagattaaagtcttaccgtcctttgaatccttctggctctggtgttggcatacattgtcccagagaaggggctaccttacgtctctatcgctttatatacgtaaactcgtaaatcattttcattttatcaaaatgcaataatctttatgcctaccgcacataacctgtttaatcactttgcatatcatgaattcttttccatggtgatgaatctgtttctgtcttgcttttgacacctacacggcatccctttccatgaatttatcataatttatagaaccggttccttgttggacattttgggggttttcgtttttgtttttcaattttaaagcatgttgacatgaaccttcttgcagtatacctttgtgccatcccagcataaattcctagaagtggaatagttgtctcaaagggtatgcccgtctttaaaacttttagtacttcccaacaaatcaccttccagaaagaccaagcggtgcgtgagcgggcctattttttctcataatcacaaccgcactgggaatctttgttttttattttttaaatctgtgtcaattagataggttaaagaggggcgtgattattgcctttttaacatacattttatttttaccaaagtcatgcatgtgcatagcttaagaaggcataaataataaaaaaaaggcttttaacaaatctaccagttctctgctccctccctccccagctctcctgagcccgtgttctggaggcagccacctatgactcttctagccatttccccagcaggcactgcagttctgcctccatatttctaaataacacacatatgccgcaggtgcgaaatggccagccagttgtaccagcatcatttatggaacattcactctttgcttgctgatttttaaatgccaccttgaccatttgcttaattcctgtgttaactagggcctcttctatactcttctgttctagcctgactcttctagtcccagcacccacgattttaattatcgtagcttaggagcgcatttctagtatcttaggaggcagatcccctctattatgattcttgtgtgatatcacatttttattattttggatgtagggcgtcacatttcaaataatatctagcgaagattagtgttaggatagtgtttcacttacacataaatttaggataagtttactatttatccttacaaataaggatacattgactcctttactttatttatttattaattttttattttttgaaacggagtctcgctctgtcacccaggctggagtgcagtggctcgatctcagcccactgcaacctccacctcctgggttcaagccattctcctgtctcagcttcccgagtagctgggactacaggcacctgccaccacacctggctaatttttgcatttttggtagagatgcggtttcaccatgttggccaggctagtctcgaactcctgacttcaggtgatccacccacctcagcctcccaaagtgctgggattacaggcatgagccagtgttcccagatttactgtatttattattattatactgggtcttctgagctgatccatgtactcaacaaatatttatggagaacaaagtgtgtgctgggtgcatgtcaggtactgttctaggcactgggggatacagcaggacgtgaagcagaggtgaatcccagcccccatggagtcagtgttctggtaagggcagcagacagtgaacactaatatacttaagtatatgatggccgggtgtggtggctcatgcctgtaattccagcactttgggaagccgaagcgggaggatccctcgaggccaggagtttgagacaagcctgggcaacatagcaagactccgtctctaaaaaaaaaaatttttttttaattagccaggcatggtggtgtgcacttgtagtcccagcaacttgagagtctgaggcgggaggatcagtcgattccaggaggtggaggctgcagtgagccatgactgtgccactgcactctagcctgggcaacggagcaagaccctgtctctaaaaaaataaaaaataaatgaattatgtagtgttagaatgtggcacttgctttaaaaagccaagtaggctaagagggattggaagtgtggggttagggaggaagggaagggtcaaggtgggcctccctgagaaggtgagatgagattagaggttgggaagatgtggaccatacagatggtctaggccagtggttctcagcctgggcgattgtattcccaggggaatttggcaacagctggagacatttttgatggtcatgactcaaggatgctcctggcatctggtggctacagcccagggacactgctaaacactctacagtctataggacagcccccatgacagaggaccatctgaccccaaatgtccgtagtgtggaggttgagaaattctgacctgggtgaagatgagtgtgggcagagagggcacccagtgaaaggaacggcgaggaagtcaggagttgggggacagggcccgctggagatgaggccgtgtgggggcgggggacagagatgtgggccctgcagaacagagtacagagtaggaaattcgactttactctgtgtgcgtggggagcaatggcagggttttgaacagagaagtgcaatgattgaaattatattttaaaacaggttccctgttgctgccatggtaaggggcaaagaggcctggcagtgggagaggatgatccagccaagatgctggcagtggacgtgagcagatgggttgattctagatatatttgaaggcagagccaacaagatttcctgatgggttagatggggtgtgaggaagagatagcttttggtctgagcggctagaaggatggagtgacccacagctgaggtgggaaagagtgggtggaacagctgttggaggggcttaggctaaacattcggtgaaggacatacaggatttaggatgtccagtacacatgcaatggcagatgttgaatatttggttggatatacaagtttggagttatggagagaggttagagctggagatgttataccccaatgggttcttcttattggctgcccagaaaagccaatacacagagaagagcaggagtattacagcagaaaaagagtttagtgagggccaggtgtggtggctcatgcctctaatctcagcactttgggaggccatggtgggtgaattgcttgaggccaggagttcaagactagcctgggcaacatggcgataccccatctctacagaaaatacaaaaaattagctgggcatgctggtacatgcctgtggtctcagctactcaggaggctgaggtgggaggattgctggagcccaggagtttgaggctgcagtgaactgagatggcatcatggcactccagcctgggagacagagtaagactctgtctcaaaaaaaaacaaaagtttaataattgcaaggcaatcctggcagtagttgggagataaattcttaacctgccttcctaaaaatttggaggctagagtctttcaaggatagtttggtggacagggtactagggaatggggaatgctggccggctgtgttagggatgaaattatagggggtagaagttatagcttcttcatttattgtgctatgacagtttccgggtgggggtcacaagatcatttgagccagtttcttggtatgggttactggttcaggtggcaccagctggtccatgggaaagcaaggtctgaaagatacctcaaacactagtcgtaggttttacaatagtgatgttatctacaggagcagttggggatggtgtaaaatcttttgaccttgtggctaatttgttagtttcacaaaggtggctttagtccctgagcaaggagggggttagtttcaggaagggactattgtcatctttgttttcaagttgaactatgggccaggcacagtggctcacgcctgttatcccagcactttgtgaggctgaggccggcagatcagttgaggccaggagtttgaggccagcctggccaacatggtgaactcctgtctctactcaaaatacaaaaattagccagacatggtggcgtacacctgtttgtcccaggtacttgggaggctgaggcaggagaattgcttgaacctgggaggcgggggttgcattgagccaagatcgctcccttgcactccagcctgggtgacagagtgagactctgtctcaaaataactaaataaaaataaataaaataaagttaagctatgagctaaattcctcccacagttagcttggcctatgcccaggaatgaacaaagacagcttgtgaggttaggagcaaaatggagtcagctatcagatttctctcgcagtcgtattacaaaggtgcaaaggtggtttcagagataatacatttgggagtcatcaacatatagatagtttctaaagcctgaagactgatcgaggtcagcgagggagtgcaaatagagacacaaagaggaccaataactgagagcgggaatattccaacgcgaagactccagggagatgaggaagacccaaagcaaggcaagaagggaccagtgagacaggaagaaagcaggagactatcacgtcctgggagccaagtgaggaaagtgcaccacagaggaatgcatggtcccttttgcccaatgctggtggcaggccaggtgggtgaggaccaagggctgatcagtgggttctgcaatgtgctccaggcaagaatggctttggtggaacaaaggtctgattttggtgagtatatgatagaatgggaagagagacactggagattgtgaatagggataactcaaggtgttttgctgcaaatgagggcaaagaaatggggagataggcttggtgcggtgactcacgcttataatcctagcactttgggaggcggaggcgggtggatcgcttgaggacaggagttcgagaccagcctggccaacatgatgaaaccctgtctctactaaaaatacaaaaattagccaggcatggtggcgtgcacctgtaatcccagctactagggaggctgaggcaggagaatcacttgaacccgggaggcggaggttgcagtgagccgagatcatgccactgcattccagcctgggcaacagagtgatgctccgtttcaaaataaataaataaataaaataaaataaaaaagaaatgagaagatagctgctgagggaagaggggttgaaaggtttttgttttgggggtttttatttttttttttaggattggagaaatcacagtatatctgtatgctgatgagactgatagaatagaatgtgaaaaacaggtagttcagaggggagaactgtttgagcccagtccttgagaagcttagagtattggagctggtggatgtgggggattggccataggtagaagcacagacaattctcctagggtcaaagccgggagggcagaacagtggatgcaaatatggtcactagggtctggaagtcctctctctctctctcctctgtgtttctctctctgttaacagctttattgagacataatcacatacctcaccattcacccacctgaagtgtgcaattccatggttttcagtatgttcccagtgttgtgcgcccatcgccacagtcaattccacaacattttcatcactccagaaagaaaccctgtgctattcacagtcactccccttccttcctgcccagtcctaggcaaacactaatctgttttctgtctctatacatttgcctattctggacatttcatgtcaattgaatcctacaatgcgtggtctttttttccgcttagcataataatggtttcagggttcagccatgttgtattaaaagtactcccatctctaaaaaataaaaaattaaaaaaattaaagttgactgggcgtggtggctcatgcctataatcccagcactcttggaaaacggtctagcaattcctcaagaggttaagcatagatttaccaaatggcccagcaattccactcctgggtgtatacccaagagaaatgaaaatatatgtccccaaagactttgtacacgaatgtgtacacagcagctttattaataatcgccaaaaggtagaaacaacccaaatatccatcaatagatgaatggataaaatataataataaatgtgtatatctgtacaatgcaatattattcaggcgtaaaaaggaatgaagcactttttttttttttttttttgagttggagtctcgctttgtcatccaggctggagtgcagtggggcgatctcggctcactgcaagctccaccccccaggttcacaccattctcctgcctcagccacccgagtagctgggactacaggcgcccgcaactaagcccggctaatttttgtatttttattagagacagggtttcactatgttggccaggctggtctcaaacttctgagctcaattgatctgcccacctcagcctcccaaagtgctgggattacagacaggagccactgtgcccggcctgtctatccttctgatcacagccatcctagtgtttgtgtgctagtatttcactgtggtttgggtttgcatttccccaatgagtaatgatgtatctcattggggatgcatcttttcacatgcttatttgctacttggatgtctttggagatgtcagctgaaaaaacacatgatttatagacttagaaaggagaactttatttcttaagaaggggttcacaacctacaggccggaagcgcagcctccacctgaaaaccgaaagcaagcacttcgagggagggcagggtggaacaggaatttatgctgaacgggctggccaaatacgcatattcagcaagttacaggaagaactatgaacattcatgaggggggtctggacgcatacatactgaacaaacatgcacgttacatgcgtcccatgtttaccttgtttaccttaggtagcagactttgcatataaatgcattacagttaaaccctacatgtcaaaaggacatgaaggtattcagtgcacagcagcctctgtaaaccggccagaaccaggccatggtgggtagtctcttattaggagaaagttactgaaatcagtctcttgtccaatcaaagctgcagttatggctggtaaatcagaggggtagggggtcagttagtgcctggcggtgggtaagctgcaattgtttcagtattgtttatctccaaaccagtgcttgtttagctgctagagaaaaagaaactcctgtggcagttagagcatagtttacttttataaatagtagtataaaaagtgtaggggtgtgtgactttatccttgcctggcatggccttaggtaatgtttataacttggtgtcttactgccacaaagagtctgttctgtgagtcttatgatctctgtgttaatgttcatgctggtcagttgttgtgtctaaaccacaaaagggatgggagtcctgctgtagtcactcttaggagaggaagtctaacggtggttagcaagggagaggtgtgtgtccaacctcccgtcccagcatggccaggaacccagtttttaagatttctctgggttcctcttggccaagagggggactgtttattcagttgggggacttaggattttctttttagttctcagagactatctattcagatcctttgcccataaattaattgagttgtgagactatctattcagatcctttgcccataaattaattgagttgttaaattttttaaattatcaagttggaaggatttttttaatctattctggatacaagtttcttttttttcttttctttttctttttctttttcttttctttttttttttttttttttttttttttttgagacatagtctctcactctgtcgtccaggctggagtatagtggtgtgaccttggctcactggtactttctcctcccaggttcaaaccattctcgtgcctcagcctcccaagtagctgggattacaggcacccgccaccacacctggttaatttttttgcttttgtttttgttttatcttgagacagtcttgctctgtcacccaggctggagttcagtagtgtgattttggctcactgcaaaccttcgcctcccgggttcaagcgattctcctgcctcagcctcccaagtagctgggactacaggcatgtgccaccatgcatggctaatttttgtatttttagtagagatgggggtttcaccaggctggtcttgaactcctgacctgaggtaatctgcccacctcaacctcccaaagtgctgggattacagacatgagctgccacacctggccacaagtttcatattaaatatatgatttgcaaattttatcttgttctgtgggttgccatattttcttgatggtatcatttgcagtacaaaagttttcaattttgataaaatccaatttctcttatttttatttgtattgcttatgcttttggtattgtgtctaagaaagtctaaacccacctaaggtcatgaagattttctcctttctgttttctactgatttatgctttctatttaattttcatttctaggtgaattggcaagtattttccggacaatgttaaataacagtgggcttctcttgttctattcctgactttaatatttcaccattaatcatgattgtatctatgggatgagatcttttaaacttaaaaaaaagcgtcctatattactagtgtttataaataattaaggactcttttacccccaaatgtatttaatctatagacataaatgtgtttttttctcttttgatctatttatgcagcaaaccatgttaatatttataatatggctaatattgagccattctgtaatgcatttctgaattaaatcttaatttgttggtgtacataattatttcatcatattgcttgttcaatagccaataggttttatcatttccttgtgattctttgactcatgaattatttggatgcaaacacttcaagagcatttttttctcttctgtttttgaaaaaacaagtttctaattttattgcattgtggtgcaatgtgataaaattgcagagattgtggtgtgcatgctattgattatttaattttagtggagaattcctttgtgtcctggttagtatatgatcatttttctgtcccattatgttggaaataatatgtctcctctaatagttgcgttcagaagtctatatagatcggtacctatatacattctttaactcagtcttgtatattgtttgtatcttctatattcttaattttttttggctgcttaatttatcaacatcagagtgagatgtgttaagatctctcaatatggttatgaatttgttcattttctttgtaatcttaccaactttgactatatttttttgtaaagcaatgttattaggtgcatataggttcaagatgattatgccttcctagtgaattatttcctttttctttgtgtaataactcttttaaatcccatcaatgcttttttttggccttacattctattttaccatatattaatattacaaaacaactctgtctttgttattttgtctttggtatgttgcttcactttcaacatttctgtgtcatcatgttttgaaagtgtccctctagtaagtttagttggttttctttttttttgtggttactggtttatttatattttctctctctttttttttttttttttttttgagacagcttcttgctctgtcatccaggctggagtgtagtggcgcaatctcagctctctgcaacctctgcctcctgggttcaagcaattatcctgcttcagcttcctgagtagctgggactacaggcgcccagcaacacgcccggctaattcttgtatctttattagagatgagttttcaccatgttggccaggctggtctcgaacttctgacctcaggggatccgcccacctcagcttcccaaagtgctgggattacaggcatgagccactgagcccggactatattttttcttttttctgttttattttgtgtttcctacttaacttgctttttcattgtttctttttaaaatctatcctgctttctaaaggattgattgtatgtactttactcttgttttagtccgtctgctggtttggaagttacacattctattttttattctcccagtgtttacctttatgttgctaatatacgcacttggtttaacccaatatgatttaaataaaaatgtctactttcctccaaaacaacataatgatcttggaacactttaattctgatcatactcccatcctatatcttttgttgtctaattatagtaccatattatttataaactccccaattttaaaaaatcattattactgttgattatttcaacttacagctgtttaccagtttcttttctcactcttgcttattgcattctactcttttttgtgtgtgtgagagttctgttttcaactgcctcacataaccccttagtagttctttcagggaaggcctatgtaaactctcttggacattgttcatttaaatattatttttccctgcatagttgagctgggtgtagaattctgggatgatagttattttcctttagctctctgaagccttattcattgtttttgggtcccctctgctcctcaaagaagatgagagttagtgtgtcagtgctttgtgtataatgtctttctctctggttatttttgtgacttttctctgtttcatatttttcagcttcactgagttaactgtaggtgtatagttttatttttcctacttggaagttgaggcacttattcactcttaggactcatggctttcttaagttctgcaaattttttcagtcatcatctcttcaaatagttccttgaccctgttctcaatattagcctttgaaatgcaagtcacatgtatgaaggacagtaaagcacggtggttaagaacacggactctggagatagtttcttggatctgacttctactccaacacttaatagctggggaaaattacttaaactcagttcctcagtttactcatctatataatggaggtaataatattaccaaactcttaggttgttgtgagaatcaaataagttgatgtatataaggtgtttaaaatggatactggcacatggtcagctctacgtaaaccttggtgattaatgttctcttgagtgccctagagactctgtactgacactgacacagttgcccagaagtcattagtgtaagtgatccggaaggaccctgcctttgttttagtccctggggatgcattttggccagagtctatgattatcagttttattttggaccctctcattctattctcttccttggaattcagattcatgtttttccatgtttgcattctgggtgattatgttagattcacccctggatcaccttgtctcctagtttactaatctgttctgaaatcctagcaatgagtttttaattttaatcactatatttttcatctcttggaattctacggagagtgttgaaatctacatgcttgtttcctgtagtttcctgttctttcatgcctgttttattattttactcattttataatttaaaatataaatgttagcataaacaatagatagattagcataaatcaggtttctccctcatcttggattctagtctttctgcttgtttatcagcttgtttttcctcatggcgaatcatttcctttggtagattataatttctgtgcaatattctagggaagcaaaaattatccaaactaatttaagactgttgacttttaaacattggtagccctgtgcttcctaggttgtggagatgttgcttcagaacatttcaaaaattgtttctgctgggagcctccatgggttcatcagtttgggacttatttttcctactatttctagctccatattggtcatgtaaatttgaactccacagccatggttcaggcttgggattcttttcattctgggaggcttccccctgcctcccagaatgaaaatataaaaatattttcttttagacagggtttgagttttctaggcttccatttcactgagcccttctagagccctagctttgtgcagtaactcagttctagttcctcatcttatgagggccctgactgaatctcctgtgggcaccaatgccccaggccctgacctgtagggtctgccatctgtgttcaggacttctggggcacctgctgacagttcattgttccagctcatgcctgaggatttccttttctttcctgaagtttagctttgtatctaatgatttttatctggtcagacatggtaggtcaagcctgtaatcccagtgcttcttgaggctgaggtgggaggatcacttgagcccaggagtctgacagggtctggctctgttgcccaggctagaatgcagtggtgtgatctcagctcactgcagcctccgcctcccgggtacaagcaattctcatgcctcagcctcctgagtagctaagactacaggtgcttgtcaccatgcctggctaatttttgcattttttgtagagacagggttttgccatgttgaccaggctggtctcgaactcctaatctcaagagatctgcccgcctcagcctccgaaagtgctaggattacaggcatgagccaccgcgcccagccttccatgtccttttatttaggatttttgcatctatagtgacaagcaagatttagtctgtgattttatttttgtttcatctttggcagattttggtaccagggttatgtgttattcataaaattaattaggaagtttttctcttttcttcatcctctggaacattttaaatagcatagaaaatgtctgttccttgaaggtttgaaactgcctgaggacagtgcctttgggggtggggaggactgttttccacatatattttccattcagcttctctacttcttaaatcagtttgtatcactttgcttccctagactatcatacatttaatcaagattttaaaatttactagcagagaattctatgtggtattcttatatttttataaattttttttgcatctctacttatctctctttcttattaatgttgttttttttctcttttcttggttagactttaccagagatttgttgatttcattggccttttctaagaagcagctgtcaaatttatttattcatcctgctgttcaactcttttaaaaatcaggacttcctcctatttaatgacttgttaaggcttattttcttgttctttttctaattttttaagttgaacatctgtccaggtcatgtattatctttcttctttacgaataaaacatttaaactgatgacgcttcctctgagtacagttctggccacattccgtaagttttggtatgcataaattgtcattagcataattttttgtagtctaaaattgctcattttatttcctccttgatgcaagagaggtattcaggagggtactttaaagctttttattttttcttttgttattaatttctagttagatagtaatgtatcccatacattttttaaaaattaccatatttttataaaatctaaaatgctgttgattgtaatggactccaattattttttataccactaaagaagggaaaaagaaaaaacccattgcttattaaactgtaacatcccatcagttataagaagcattctggtttcagagatgatgtgaaaaaataaagtacatcttagaatgtgtgaaatagggagattatttgtccatcagtgtgagagcattgtggtcagagaatgtgatctgtattgtaatagttccctgaaatacattgtaacctggtatttgatatgtggtcagcttcatttttttggtttttgttttgttttttgagacagggctttgctctgtcacccaggctggaatgcagtggtgcaattatggctcactgcagccttgaaatccagggctcaggcgatcctcccacctcagcctcccaaaatagctgggaccacaggcgcacaccaccacaccgggctaattttaaaaatatttctgtagtgacagcatctccctgtgttgctcaggctagtctcgaactcctgggctcaagtgaccctcctgccttgacctcccaaagtgctgggattacagacatgtgtggttagtttttataaatgttttataggtgtgtgaaacaacgtttatctatttataatgtatcattatttatcatttataatgtatcttctatatttgctagttacaggaatatgtatatttctatgcattctatatgttatatatgcatatcacacacaggcctatgtaaaatcagtgttgaaattgtgcttttcaggtctcattgcttggttttccattactgcgctgagacctgttaaaaccttccattttgatggtggatttgttaattttccttgtgattgccactttttgctttattacacacacacacacacacacacacacacacaaacacacatatacttatacacacatacacatacacacatacatatacatacacaaacacacacgcatatacacatacacacacatatatatatacacacatacacacacacacttttttttttttttttgagatggactcttgctctgttgcccaggctggagtgcagtagcacgatctcagctcactgcaacctccacctcccaggttcaagcaattctcctgccttagcctcccaagtagctgggattacaggcacacaccaccacgcctgcctaatttttgtgtttttagtagagatgggggggtttcgttatgttgaccaggctggtctcgaactcctgaccttaagcaattcgcccacctcagcctcccaaaatgttgggattacaggcataagccaccacacctggccacacacttatttttaagggacaaagtcttgctctgttgctcaggctggaatgtagtggtgcaatcatagctcactgcatcctcatcctcctagctcaagggatcctctcacagcagcctctcaaatagctgggaatacaggcacacaccaccatactcaactaatattttaattattttcgcagagacatggtctcactatattgcccaggctggtctcaaactcctgggctcaagcaatcctcccacctttgcctcccaaagcactgggattacaggcatgagccattgtgcccagccaacatacatacttaactataaattttttagcaagtctaaagttattatctctgttatcctccaaaacaagcaaggacctttgcataccagaactgtacactgagcattctctcttgtcttccttattgttataactgagaatttttcccaccttaatacaaaaaagtatcattaatatttacagtagggctgggtgtggtggctcacgtctgtaatctcagcactttgggaggctaagatgggtggatcacctgaggtcaggagttcgagaccagcctggccaacatggtaaaagcctgtctctaccacaaatccaaaaagtagctaggtgtggtgctgtgcacctgtgatcccagctacttggaaagctgaggcaggagaattacttgaactcgggaggcggagattgcagtgagccaagatcacaccactgcactccagcctgggtgacagagtgaaactccgtcccaaaaaaacccatatttacagtagatagttaattaaatttacttataaattataccaatgttcatgtattttaaatctcactccttctctgtgagttcatttttcttcttgccaaaatgtatcctttaaaattcaatttcagggcaagccctcttagttttggatgtctgaaaatgtctttattttgccctcattcctgaataattgagtaggatgacctttactttcccgtagcactttataaaaatattatattactacattgtttcctgggcatctcttgatgccagaatgtttacagctgttctaactgttggtaagtctcttttcttcctgtaaactttgaggtttttctctttgttttgatattctggagttttaccaagattacgaatttatttttactgtttagcagtttgtgtacatttttctggaacattctcagccattatcctctcagtttattactttttctaccagaaccctgttctcttcttttaggactccatattagatgaatggggtgctttttaacaattgcgtcagattccagagtgtggatttattcatttaaacatttattatttttaatagtttgtttgactattcttcttctaatggaaatttatacttttctactaaaaacaatgctatagccaatgattttatttctctctttttgctagattctatttttattgtttcatggttaggtaatgactttttttttttttttttttttttgagatggcgtcttgctcctgttgcccaggctggagtgcagtggcacaatctcggctcactgtagcctccgcctcccgggttcaagcgattctcctgcctcagcctcccgagtagctgggattacaggcaagcgccaccacacccggctaattttgtatttttggtagagatggggtttcaccatgttggccaggctgatttcgaactcctaacctcaggtgatccaccttccttagcctcccaaagtgctgggattacaggtgtgagccaccccaaccagccaggtaatgacttctattgagatttttttcctgtagtccaatataagcccattttgctaaataatctgtaagtaaactatattctgtttgctgagcacaaaaatgtgagagggagtgccagattttgtctgttgaatccttaataatctcaattttgtttgcacaatttgttcatttaaaaagtgttcaggccaggcacagtggctcacacctgtaatccctttgggaggccgaggtgggaggcctgcttgagcccaggagttggagagatcttgtctctacaaaaaaattaaaaaaataaccaggaaaggtggcttgtgcctgaaatcccagctactcaagaggctgaggtgggaggatcacctgagcccagggaggtggaggctgcagtgagctgtgatcgcacccctgcactccagcctgggtgacagagcaagaccctgtttaaaaaaaaaataaaaataaagagtgttaaaaactttatgtgtcgagatttatcaagtccccttcttttgccctaatcatttgttttgtagacttggaagctatgttgtgagacgtacaggtttctgttcatggcagtcactccacggggctgatccctggaatcctcctgaagcttttggggacctcacaactgggccctgggctccaccaggcttcctggcccctgaggggctgcccagccttcctcacaggctgtctgtggtggcctgcagggctccttgctgtgtctgaccagccttcctctgtggatacgggccccacccctcaccccatttttatatctttttgctctttttggtggaaatttgggagggagagcgattcaatcaatgatgctagttgccatttgtaccatctcttagatcctctctacagctgctttttaaggcatggaagttcttttcctgactcctcagcttaacttccttccttagctccagcctcacgcttactggaggtgaatgttgtccattcctgcgccgctcttggaaggaaagaatgtttccagcccccttgatgccgttcgtggtgggggcagagagctggtggtgctcatgaggtaggagatgggcaggactcgtttctggtcacaaccttgctgaccaaaacaagatctggtccagacaagatgaagtgaagaaactggtggaaaccagcagatggtgatgaaagcagtcccgggctgccctcattgcccattagcataaaacacacttgccagcgccatgacagtttacaaatgccacggcaatgacccggaagttgccgcccctttcacatcagcaacccggagtttactgcccctttcctgcaaagctctaaataacccaccccttgatttgcattaacctgcctcctttcaatttcagtttgcatgcaattgaaagtgggtataaatgcatataaatacggttgtcaacagccagtgccttgggtgcactgcctgtgagttagccctgcttcacaaggagcagtactgttcaataagattgctgtctaacaccatctgtttacctttaaattcttttcaagggtgtgtgaagccaaagaccctcccaggctaggccccagttttggggcccacctgtcctgcatcactagtagcctggcctgtgtgtttggtggcctggggttggagattgggttctggagggagacttcttatgccccctcttgtctgcgaggcacggggacttggtgcactgaccggcttgttgacatgcccagcactgggttgggttgagcccaggagttcagaagaccctgtctctacaaaaataaaataaaataaatgagctgggtgtggtggtgtgcacctgtaatctcactttccaaagtgacctgtggacaagggatcccctttcctgggaagaaggagagcaggttacggatgctcagatgtttgtgtgcattgagattggacttggcaacacctgcaccttggaatattctgggcagttaaacatcactatgttatcattcagttctcacaacaaagccctgaactgaggttgagctcatgtatgcgacccagtgggattttcacccgagtcctctgtctctggtcccttgtggaggtcacctttatgggggtaacttctgtaagcaaagctccgcactcacggagcccctctgtctttccccatggagggtccatcgagccctttgcacggtggtggcctagccccccatggctgggccatcaggaaaggggtgatgcccactgcctcaccacattctgccctgcaggctgctcagttcctgcccccactgcacgggggacccttgctcctttggctccccctgaatgggcagaggagctgcctctcatctgttcttcaccagcagctcaagaggtctttttaaaaggacagtttcagccatgcacgatggctcatgcctttaatcccagcactttgggaggctggggtgggtggatcacttgaggccaggagttcgagaccaccctgggcaacacagggagatttcatctttacaaaaaaaaaaaaaaaaaaaataggcgggtatggtggtgtgtgcctgtagtcctagttactcaggagactgaggcaggaggatcacttgagcccaggagtttgaggctgcagtgagatgggatcgcaccactgcactccagcctggacaacagagtgagaccctgtctcaaaaatgaataaataaaaggatgatttcttttttttctctctttttaaaatttatttatttttgagacggagtctcactgtgtcacccaggctggagtgcagtggcatgacctcggctcactgcagcctcagcttcctgggctcaagcagttctctcgcatcagcccccagtagctgggactaagacgcgcgccaccatgcctggctactttttgtatttttagtagacatggtgtttcactctgttgcccaggctggtctcaaactcctggattcaaacgatctgccagtctcagcctcccaaagtgctgggactacaggtgtgagccactgcacccagcttgaaaggacaatttcgtacatcactccacacccagctacatccttgcctggaagtgccctcccctacctactgcctttccactctaggtctcaccttgattgtcctggcatgggggccttccatggcacagaccagggcaatgctgtggtccctggctcagggactgtctttgccccacggggaatgctgtgagggggtgcctggagtcccagcgttacgcattgaccagcgcatggtgagtgctcagtgagggttcctggaacaaacggatgaggtaaaggtggaggggcaggaggaaggaggtggtgaagggaggaggggaagaagaggagaggaaaaggtggtggagaggattgttcctgagcccagctctgggttctgcctgttcccgaacgccaacctttgctgcactgctcccagtgggtgccaactcagaatgcctgtttaagtcactccacaaaactcagcttctcaatctgttttatatttgcaagggccagatccacattccttttttaaaagtcaagcttctgagacagtcatttatattcacagtgattctcctttcaaagactgctttgcatggggcgtgtagagtcatggatcttagggactctgccaggaaaggctcagggtcacacaaagaccccgtgatggtgtctgtgttgtagaggaagaccgaggaactctccaatatgcctgggtggaggtatcttcaaatggacaggatgcgtggccggagcctgccgtccatccactgaaaagtcactttctgaagtgacccctggacaaaggatccttcttcctgggaagaacagctggttatggatgcttcagatgtttgtgtgcatggagattggactttgcaacacccacactttgaaatattctggacagttagttaaaaagcatcaggtggcccacacctataatcccagcactttggtaggccgaggcaggaggattgcttgagcccaggaattcgaaatgagcccgggcaacatagcaagaccctgtctctacaaaaaacttaaaaattatctgggcctggtgactcgtgcctgtggtcccagctactcagtgggccaaggcgggagaatcacctgagcccaggaagtcaaggctgcagtgagctgtgatggcaccactgcctccggcctgggggacctagtgagaccctgtcccccaaaaaggtttaaaaagcaggaggggccaggtgcagtggctcacgcctgtaatcctagcactttgggaggcagaggcaggcggatcacttgaggccaggagttcgagaccatcctggccaacatggtgaaactctgtcactataaaaatacaaaaattagcaggacatggtggcaggtgcctgtaatcccagctacttgggaggctgaggtaggagaatcgcttgaactcgggaggtggagtttgcagtgagccgagatcctgccaccgcactccagcctgggtgagagagtaagactccatctcaaaaaataaataaatacataaaataaaaagcatgaggtaggtccatatgcactgctgggaaagatgtctgaacagtgttgttaagtgaaaaaaagcaaaccgtagcacaatatgtacatatatacaccatttatggcaaaaacacacacaaagccacactgtatgtcctctatttacatatttgtaagttcatatctaaaagtctgaaaggaattatgccaatgatcgcagttcggagtggactggattggggcgactttcaaaggaatcttcacttccactgtattgtttgaagttttttcctgtgagaatgcattcctgtgtacttgtgtaatttaaagagatatatggatttagaactgggaatctatatggtttaccctgagcttctgggattttcttttttatttatttatttatttattattattatactttaagttttagagtacatgtgcacaatgtgcaggttagttacatatgtatacacgtgccatgctgatgcgctgcacccactaactcgtcatctagcattaggtatatctcccagtgctatccctcccccctcccccctcccccctccccacaacaggccccagagtgtgatgttccccttcctgtgtccatgtgttctcattgttcaattcccacctgtgagtgagaacatgcggtgtttggttttttgggattttcatttttatttctttgagtgattatgttaagtggcttacccaaaaaagttcactggacatctcaaaaggttatttgacagatgatttaaaaaaaattatactgccatttttatgcatgtgcttaaatatctcaaattgttttctaaaattggttgggaatatatttgcttttttcccccctttatcttgccccatccccttcccagcctctggttactgccaatcttgtctctgtcttcatgagatccaattttctggttcccacgtatgagtgagaacataatgatatttatctttctatgcttggcttatttcactggacataatggtctccagttccatccatgttgctgcaaataacaagatttcattctttttaatggctaaatactattccattgtgtgtatgtaccgtattttctttatccatttatccactgatgggcacttaggttgatttcacatcttgactattgtgactagtgccgcaataaacgtgggagtgtagatatctttgtaatacgctggtttcctttcttttggatatatacccaggagtggatcatatggtagttctatttttagtttttttgtggaatctccatactgttcttcatagtggctgtactaatttacatccccaccaacagtgtacaagagttcccctttctccatatccttactagcatctgttatgccagacagactatttataagtgaattatatttgtagtttaggccagaggtcagcagactttttcgtaaacgaccatggagtaaatattctaggcttcatggacaaaaaggtcactgtggaagtcactcaattgccatcataatgtgaaggcacccacagatgatacagaacaggcgtggctgtgttccaataaaactttatttccaggaacaggtggctggagggtgtggtccatgggccacagtttgccgaacactggtttaatggattgcaagacacagatgggtatggaaatggaggaagatggcaaatggaaatgtgttggacatttaatcagaactagcatgtcgaaaggattgtttgagtatcttcaaaactgaaaaaaaaaaaaagcttttctcaagtgcaatcctgtagcctcttcctgctggaccagggtgaggctggggccgcagaacccaggagcagtgtcccccaaggaacacttcctctgtgactcctgatgggtagagggtggaggggatgggcaggccttcctcaagcctgagtttgcacatggttcacactcagtgggcatccgggaaagtgatcagggccccagtggcccacccagctctgggcaggcagcagacaaggtcagactggggtggacaaatgacaaaatgacatcctcaggtttgggaggggacaagtggtgtctctgcagctggaggccgaaaggcaggcctctggctccgggacggggtgtcggaaacggctgtgccccacacagctttctcgtggatcatgtctgtgcaggtgccttggggcctgagaaagaagcaacgttggctgcacaacaggaaaggcccattagtgcctgtcgatgtaggccacgctaattagtcacgtggctggagatggagcagtcttatctggaactgagcccttcatgccccacaggactgtgaaagtcagggggtacacatagggaagatgggctttcttctcccctccatgcccgtggaagccctccaggctgagtgtgagcatgtgtgtgtgtgtgtggaccctgcaaatagatgtggcagagaaacagtcactagcagacaaggactccgctgtctcctcctcccagcctcacggggagaaatctgtctgcctcgcgtttctagagtcacagtgatgacaaaaaggaggcagagctcacggatccaggaatggggttacgcggagaccagcagagttacactgcagagaagagaaggaaccggaaggtgggagggtctggggcaggtggccgatggagcccagaggctgggcatcagggaagagggtgccgggagaggtgggagagtgggaggagaggggtattgatggcatgaccagtggaattcctcttgttagtaagatttgaagatagacttaattagagagtagttgttaagtggtatttttctttttctttctttctttcttttttgagatggagtcttgctctgtcacccaggctggagtgcagtggtgtgatcttggctcactgcaacatccgcctcccgggttcaagcaattcccctgtctcagcctcccgcgtagctgggactacaggtgcacatcaccatgcctggctaattttagtatttttagtagagaccagtttcattatgttgcccaggctggtcttgaactcctggcctcaagtgatctgcctgcctcggcctcccatagtgctaggattacagttaggtggtatttttctgaaagggaccccagggatgccaaagccagcctgggggccagcccctgtgtgatcacaggcgtgtgtatgcatcgagtgcccatgagaaggcacctaggtttgcacatagtgaggctgcagccagcatcaccccatcttgaagaatggggtttgcagatggagggtgaagggcacattcatcccctttgcctgtgtgctggccaacagtggtcagccacaagtggatgttgcccagagaccctttccttgggtctaggtttcgctgtgggaagggaagtgggagaaataacgtaggagaaagccttcctgcagccccaaacggaatttcctcccctgcttgaagtcagatccaattcacaccctcgcgcagcccgacggctggcgctggctctgtttggtaacatcgcagcaaacggccaccttgtctctattttggttcttgctttgccacttctctctgcacctttcaagaagtgttccttccttctggaaggctggggtggcaggctcccccagctccttcccattctggtaaattaaggaacaaacggtgccaaattgttcttgtctgttttgcgagatgattcgtaaccagcttgttttcttttcctccattgagcgaatgcattaaaactaaaattaaatcattacccgcagcacagacgacactccccctcataattacatcctcttaatgggcatttgagagcccagctcattttaatgcttgctggaaaacgtctcagacacatttatttatttttttttaggtttaaaggtcaacaagaatatcttaccttaatttgacaagtacgcaagaaataatgcaagactcgtttatgttcaggtaatgcacaaagaaatctataaatcaagctgagggaatattagatgatgccatatcggaaccatctgccttcattctcggaagaatcgataccacaaagaaagcgccgaagacgtagatttatgcccttgtgtcgggggaaaaatatcggctgtttttagagtcacttcatatcctaaaacaacagggcctgaggaaaagaatgagagtgggcctaaccccgagtgaatgcgtcagacagcacatctgacactcggttttcgattgtctctgctggagaaagaatggtcccaaggtcctttcatccccatgactctgccccgtctgctattgtatttatttgagaggctgccaggaatgttgagatggcgtggaagggaattaactaaattgcatctgtgtgattgttgccagggggtggaggcttgtagagctcggggaccctgggttttccatgccatgcacactgcctaacactctgccctccttgggagagccttcgctggccttcatcatggagctgggggaacatacaacctccaccatattggatgttgggcttgtccaaagatgtgtcaaatgggaagagctgtctgggctttgtgaggggggaaagatagcctccgagcaattagggtttggaaaaatagggtaatcatcttaccacctaccccagaagtggtcatgaagagcagcagctctccagggaggtggaagggaggaagaacagatcaggtgaccctctggcaagtgtatgagaatctccaaggagggaggggaagagttgtaagacttgaatattgaataattggagaggctttttttgtggggggcttcaaaatataaagttatatttttataatcaaatgatagaaataaaggcttttcatcttttcctgggggtagagcgctgcagaattttgaataaaagagatttggagattctgagattttgcttcgtgacactcgtattaggatatatggactctcgtgcgtgtgtgtcgccatttatactgtggttcccatcacgggtcaaaaacaagcattttctgtttgaacgtgaggatatgcttagaggaagaaagtttgatttttgtatttataacagagtagcacaaaaatgggtccgtgagcctcgggaaacgtatttgtgttgcatccttagttttatcctttcaggagttgaagttgcttctaatgttatgagagggaaatcaaagggcccccgctaagcagaatcgttcccatcagccacaggcaccagtgcactgtgctcatgaccttttgtgctaaacaaacccacagacacacatacgcattcctgcttcttggagcccgggtgtggatggatgcctgacctgccccatcaccctttggctactggccacagagttcacattgtcacagagttcacattgccatctacaaaccaaacatgaacattaggactctcgtttttgttttctttgtcccttttgggtgtagctgaaaatgatacttgcagctcatatcaaagatggatttatgtctattgcaaagatggcgacgtgcaccttcctggaggtgctggcaaattccaggcagtgaagccaaaccactctcgtgccttaaataatgttggatcaagatcatgtgaaatttattctaaaacctgtggtttttatttcttcctgcaaagctccattctctgcttcacatgagagaaattagcaatgaagcacctcgtcaggatccaaaacgcctgccacccatctgtgcaaaaccctggcagtcctggaggagacaaatcctcaccttcctggaaaacttccatgaaacctgcagtgagggcagccagaccttaacttggcaaagaaactgtgaaggcagcctggagtgccaaactattaacttagtgagggtggcaggcttcaagttttgcagaagcccaaatctattatttaactattagttgtgatgaatggatgatgaagggaaccaacgtagatatgcatgaggcatggccgaagatgatatcattgaggaaatgctgttttcttaagctttggtgactaactatagaattgattatgtctttgaactggagtcaaatttcttctaagtgagccgaattggaaaataatattaaacttccattaagggtgttccagaaatgccgaattcaagacaaggattgtgtgcgtttctgtgtgtgtgaatacaaggggaaaccttacagatatttgcagaatatactccatcatttcctgccaagcatcagcttctagtatttcgccaagttttttagaagacttcaaccttgttagcaaagtaattaagcagaaagaaagaaaagaaaaaaacaaaacccacaaaaatgaaaacaaaaccccaatgcattgagtgccttgctgtttttctgattctgtgaagttgaatatcagtgaattcaaattgcacactgggttcttctgatatgaactgaaattgtcaaagatgttgggtgagtctatgggctgaagtttaccgtatttttaatcatctgagaaaagaccaactgcaccaaactttcaaaattgatcattctgaatagtgcttggcatactcagcagacatgattgaaatagttttgcagacacagcgtaaacataaaataccaaccccatcacctgtcctgacacacaccagcagtggtagcccagggccagcgctggctgcagaggcatggtgccaagatcggctgctcattttcccttcttgatgaatgcttacgggccagtttctggaagccctttccaggagcgtcacatttttctgtgggtctgcctgcagcccgggctcctgagacatttcctaaagacctccattagaagcttccactgctccccttactggcaggcgttcagcctttgccaactgcaggttgatggaattgtcggagagagagcatgtcggggggctctgttcatctcccctaaagtagtcactgacatgagcaacactccctgtatgccaggcactgctcccttattgcccattttgtcctcgtaataatcttgcaaggtagccacaagagattattactcccattttgcagatgaggaaactgaggcatgaagaggttaagtagcctatgtagctggtaagtggaggagccagagtctggaccccggcatcctggcagttccagcctccttctcccagtcatcactgtatgttccattgttccgtttctatttcactcacatataacgagcagctaagtttcctgagtttttggatatgacaacaagcagcgggggcccagcttactgagaagagtgaattacagttttttcaagatccagaatatccacatcagaaaagctcatggccggcaagtgtgatatcaacacacgttgatatcacagcatcaaagtaaaaactatgtaattttcaacatccaaataaagccttctttgaaaagcaccgattttcacatgagaatggtggacagatttccacatcctggcccgagatttctcaccgatcctgttgctgttgtctcttcccaggccaacctgtttctgcctggcctcttcctccaaggccaagaggggtcctgccaaagtccaggtcagagagtgtcctccctctgctcctgtctcattcagagtcaaagccaaaatcactggagtggcccacatcactgccccccattgcttctctgaccatatcttctttcgtgcttctttatgtctctccagacacactgggtgtcaagagtgctgtcaccccagggcccttgcacagctgattccctctataacccttggttcacatgttgccttctcagtcagaactcctcccacatactcacctttggcctcaagctctcccagtcctcctccccctactgtgtttttcttctgtccttagtatttctcaccctctaaggttatatataatctgcctctctcctgcttggagtggaattctatgagggcaggatctttgttttgttcatgaatggatcccagttgcctagaatagtgccaggcatgtagtaggtgctcattaaatatttaccacatgtgtgatttacctccagaggggaggagggttgcaaagggaaccccaagtattggtaattgttttattctttaagcttgggtgatgaatgtgctggttcttctttatgttatttacctgtatgtatgtgtatgtatgtatatatatgtgtgtgcatatatatacacataaatatattctgcatatctgaaatgtttcatattaaattttaaaaaatcaaacaggatcaaaaagtaaaagaggtgtatggtttatataagtggtggaatcctcttctccattgaaagtatttcttttctttttttgtgtgtgtgtgtggtggggtatagagtctcactcttttgcccaggctggagtgcagtagtgcaatctcagctcacagcaacctctgccttccaagttcaagcaatcctcctgcctcagcctccccaggagctaggattacaggcgcacaccaccacacccagctgatttttgtattttttgtagagatggggtatcaccatgttggccaggctggtctcaaactcctgacctcaaagtgatccaactgcctcggcctcccaaagtgctgggattacaggtgtgagcccctgtgcctggcccccatcaaaagtattttttcatctttgtgtaccatctcatgtcagcgacggaaagtgcaagttcttaggcagatgtgtttgcgatgggggaagatgcggagaaacaggaagaaaagctgggcagggactctgactggccgggcagtcggggcccacacaaccagaggagctgactgtcaaagcaagagtgttggggaacgatgagaaatgaggtggagagttagccaggatgagacggccctgggccagcttccgagagcaggacgcttggcgtggatgtctgaccacccttggcaggggagcctgcatctctctgacagaggagaggaagaaagagaaatgacattttctgagccgccaagaaagaagaggcctgaatggggaagggctgagttcagggacctggatgaagacatcacgtggggtgacgctgtggttgaggatggacccaggcaggacgcgcccaggtccaccactccctgtgaccccatgagattccccaaatcctcagaaggggagacacttcctgggtttgcaatcacctccagtttatgtatatagccagaaggagtaggagtccagatgtggaacctctgacccagcccagggctgtgtggtccgtgggcgaggtgagctggccaatgtccgggtgtcgtggctgggaggacacagctggtccccgtgcccgccaagcagcttcccagatatcgatcagtgcctctggtgagcatgactccttctgaggagtcccattgatcaggccagatggaaaactagtagctgtgattgggacgagtgaatattcatttggaaatgtcaatgagtaactggagatgatgcctgcagtgacttgcctggcaggatcaattccagacatgaggtgaaccagacgttggcggggacctaaggtgggagccagggaccctgggtggggcagggggagtggtggaggccagagaatgtgtaggacagtgaggtcagacacatttccctgcctccccacccccagttctgaggctctcttgtctgtctggggcttttgtcttcaagtgtggcactccttgcacagtggccaccaggccggaggacgtctgtgtgtgtgtggaaggggttgaagggtcccaggacgtgcacttgctggaagaatgcatgggtctgctgaacctgccttcctcctgggcatgctgggaggaggggctgcaagaaggtcaagctggaggggtctctaggctctagctgagacccttctcccactttttttttattttttattttgagacagtctccctctgccgcccaggctgaagtgcagtggcatgatcttggctcactgctacctccacctcccgggttccagcgattcttctgcctcagcttcccgggtagatgggaatacaggctcgcgccatcacatctggctaatttttgtatttttagtagatacggggtttcgccatgttggccaggctggtcctggactcctgacctcacgtgatctgcccatcttggcctcccaaagtgctgggattacatgcataagccaccgcacccagccttttctcctcacttctgtcagtaggtcccagctgtgcacaagtcagggctggggccaggggaggctaggagattttggttagggtctccttgcactgggatggagggatggagggattcagccacttcaccccaggagctctggccctggctagaggcctcctggacagaggagggaagtcatcgctgctggcctgtgaaggggccctgtcagcttattgccaggtgcactgtcacctaggtgtggcctgctacttcccccagtcccaattaaccatctgcaggagctgccatcggcatgggggaggggctgggtcccactcgtctgtacagactgctcagctaatgagggggtctgtgaaatttttaattacggctcccatgcctggcttaattatttgcatatggcttttacaagtgggaaaaggacgattgcatgcagcgcagcacttctcctcagccccacgtttgactttaattaaaggcagaacctgaggtctttccatcactaatgatcgtggaaaattagcttccaattcccaggggtctccagagtgatgcaccctgaggcggagagcgggcggagaggggatggagcagggagaggagcgggaggcacagatggcagatggtcctgctgggccgccactctggagtccccccaaccacaggccaccctcccaccaccttccctccaggctgcgtagagaagggagcctcactttcctctgccaggaagcagacctgaccttgggcagcaactaggaggaagacctgctgagctggggtgaaggttgccagggtcattctcccgttggccaggagctgggtgtgttctggctgtagctggactgctcccagctggtggccacaggcagaggagtgggagtttctgaaatgagtatacgtgtgtgcacacatgtctacagcatgtgctcacccaggcacacagatacacaggatggagccgtagagacacacctgcatgctcacacatgtatgtgtacatatgtccactcaggagcaaaggagtgaatgtgtagtgggccctgtggccatccctgtgtccccatccctcttgtctcctactcactgagctgggaggagctgaccccagggcagtttcatcccgctgtttccagtagccaggcctgcaccacccccagcacagagcatcccctcagccccaggcacactaggtcaagaagttctattggctcaggatccaggggcttgttcccttgttgcggatggggctccctcccttctactggacataatgaggatgcctgtagcttggactatgtctgtagccattgaaccatgaagggagctctcaggataaaacctgccccaaggacaggagcagagccactagcagagcctgggtccccagtgacactgtagagcctcgatttccctgatgagctgggttttctgtttctcgcttccaaaaacatcctggtctaggcagagtttgtgtccaatgcgtggtctcacactgcacgtggttgatggcaaccactgaaccacgcaagagctggtttcctggcaacaccccagcctccttcctgccccactgaggaggctgccctgtaggtcagggctgagccttcctggcacaggggctgaagtcatcagccagggctgccgtaacaaagtccacagactggggagcttgaacaaccatgtttaggtgccatctggtcacagagctgtaggaaccagcttctgaccagtgaggctgtagcagcctctcttcccagaggatttttctccctcagctgattttgcacaaaagtccttgaaccgggaagcattgttctcatccaggggtcacgtgcctttccctaatccaggctcccgggttgggggagctccagagtggcagcccagcaggaccatctgcctttccccaatccaggctcctccttaagcctcatgtccattctggatttggcctgaggtccacccattgcctcctctttcattgtaggaggctgaggcaggaggatcacttgagtcctctttcattatagagggagcaatgggtggtggacctcaggccaaatccagcatggacataaggctcaagtaagtttttttaaatgtgcattgcttgccaatttcagaatcaggaaatttcaagttaaaaatccagtttccaaattggaaggtctaaaggtctgcattgctacaagggtcatcagatgtgtcatttaaaaaataattttgggtccagtgcagtggcttatgtctgtaatcctagccctttgagaagctgaggcaggcggatcgcttgaggccagcagtttgaggccagcctggccaacacagtgaaaccccatctctactaaaaataccaaaattagccagacgtggtggcacacgcctgtagtcccagctactcaggaggctgaggcaggagaatcacttgaacccgggaggcagaggttgcagtgagccaaggtcgtgccactgcactccagcctgggcaacagagagagactccatctcaatataataataataataatttttgccccggtgtgatggcttacgcctgtcattccagcactttaggaggctgaggcggaaggattgcatgaggccaggagtttaagaccagcctgagcaacatagtgagaccccatctctataaaaatttttgaaaattagctgggtgttatagcatgtacctgtggtcccagctactcaggaggctgaggcaggaggaccacttgagcccaggagtttgaggctgcagcgagccatgatcataccactgcactccagcccaggtgacagagcgagacccagactcttaaaaaagaaaaaaaaaaaaagaaatccaggtttccaaataggaagatctgaaggtcttgatctgctaccaagggtcattggatgtgtcatttgaaacataatttttattatgaaagtgtcttgtggttattataggaaatgagctgcttcaaacagctgctcactagagaccaatgactgacattttgagtcccactataaaaacgcctgtcttcattcctctttagagcaatcacataagaagtcagggctccagcaaccccttgtgtgatcagccggcaggggggggcactggggcatgagtgtggggtctgtgtggatgctcttttgctttaagatgctcccagttagccgagtgctgcccacatccctgccccacctgcccctgcctggcagacagatgccacagagccccacgtacagggatcataatggtttacacctcttctgcctgtgtccttgaggttgagcgatgagggcatgtgaaacccaggatggtagaaaagaggctgcaggcttagggaaagaaaccagagaaaccagactcccttggatgttgttcaagataagcaaataattcagcagagccatatggaaagatggtgagaccggccgtggaggagcaggcaccctgcagagaggactgggacccagcagcccattccaccagacccaagcctgttcctccaccccagggcagcatcccaccactgcaggaatcttctcaaatagctccatggtaccagtccaccaggggcctacttactggctgggaaaacaggagcccagatacatagcatgaggatgccccaaatctcccagtgacaacattgaatgctgagtgctgtctcctctgtgttactctcccacagtcccctctgtcagataaaagccgttagtctctggaacacacaggagggtgcctcacttggcctgggggccatcaaggaatggtgagagatgagactgggcacgggaggttggcagaggcaggatattcacagatctggtggaccatgctgagacattttaacttgggtcactgggcacctggggggcttgggagtgaccacagatgtattgcaggacaggtgttgagatggggagctgtccaggctacaggtgctgaatcagagccgcaccgagggactgggaaagaaagacaggacacatgttcagaaggccagatctgcactcaggtgtcaggagagggaggaagtgttagtctggacccacatttctggctttccaacactctgtggggaaaaagaagggcaccaaggggtcactggggtggaggagacttggaacacaggacgttagctggaaggagatctgaggcagagactaatggagaagggatgttcctgtcccatgcacagtcactcattagtgcttccaggtcatttgaagccccagtcacttcctggtggcctaaatgagacctgtttttccacagagcatccaggatagggccaagagacttttgttctgccatattcttagtcttgagccttcacattgggagagaccagcctgttttgagatgagctccagggaaaatcatgctggactggtagaggtcaagactgtgagggtttacctgtaaacccagtgctttgggaggccaaggtaagaggattactggaggccaggagtttcagaccagcctgggcaacatagtgagaccccacttctacaaaaaattaaacatttaaccaggcactgttaaattgagtagtcccagctactcaagagtctgaggtgggaggactgcttgagcccagaagtttgaggctgcagtgagccatgattgcatctctgcactccagcctgggtaatagagtgacaccctgtctctaagaaaataaaaataaaaaaagatattggaggttaccctttggaagccagcctccttccaaagggtatggccatgcttgtgtgctgagtggacccacagagcacaaccactggactccacatgaccccagcccgaaggacccagctggctccagtgcaggagcttcctttcaccttcgttgtccttttactagcttctcttcattcgccacacattgcccaagcacctgctctgtgccaggcactgttggcagctggaaacacaaagacaagtcctctggggcctccttgtgccagccacagggagagagattccctggaaggcagccaaggcttcttgccattctctcctcagaagtctatggactgccttgtgtgtctgcaccctgccaggggccagggcatttcaggtttactcacagactcctctctgtccatattataccccaactttcaattttgagaagtaaatatgcaattttttcctccctgtaattttccctgctgtggctgcggatgtcagagccgctggaaaatgtgaatagctcagtgctttctagaactgaaaggaagctggccatgccgcatcctacatccccaggtgctcttggcaggatccagcagctcaggtggggagagatgctctccaggctgtactgtcgagggaacttttaacccaaataattcatgttcccaccttcttccattagcaacgagataattgccaagaagtaagtgtgtatctgtgtgagtgtgcacacgcatgcgtgtctgttgcagggacattagcagaggaggcgaagtgagtgtatttgcttatgcagccaaactttctgcgtgttcctctggagactgtcagaccttcgtgtctcagtaactgaaggtcaggacagtctgatctaagcttttgttttggaaaagcatggctggggtggagagagagaggatttgagtcagatctggggtggcgcttatttcttgtgtgtaaccttggccatatttagtctctctgggtcttcatttcatcatctgcaaaacagagtggtgggcttggagatctgctgcccagatcttccttccaagaaggatttgctgaccacctggggactgtgtgatcagcagccagcctctagtcctcaactccacgaggggctgcctcatctgagatcacgcccttctctgggcaacccacatccagctactgagtaagggggaggtgtaagggtccagccctatcttccttctgcaggacactccgacaggctgaatccactccggagcccaccatcaaggcctacatccctattccacttcttcccactccagcttcctcccttttccctttgcaggtattgatccttaataaacattgtgcaccccaaactccatctcggtatctccttacagagaaccaaacctgtggcaaatagggataatgatttttacttcaaaaggttattgtgtgaaagctaaatgggatgtttatgtagtatccaacattgtgcctggaacgttaacaaataatgataaatacctgttcctttttcttttctttccctcacaactgtgactcaaaatcccattctgggcctcgagcaggtgttcctaacctgtgctctgtaatattggtttggaaaaagcccagcaaggcaagtggccctgaaaatctgtgctgcggctaaatctgagatcctggctgatggcttcagagccaattcttgtccctgtcaagttcattatccatggatcacgtcagccctcttcaaggttcctcactgaaaagaaattgagcatgcaaatactcttttatcataatcaccacgtatccacagggtaattcataaaagagctggaaatatgttgaaattcaatattgttttagtccaaatcgatattaataattgtttgcatttttaaagtgcaatttgcaattgaaaagtgcacaaagatcaaccagtagttgctaacacatcaaattttcctattaaaggcacagtcccttaactttaaaatgtttcttatacaacaggggctggagctgatccatggaaatgactatctcttatttacgtgcacaacattagaattggcttccattctgcatgagctgaaaggccagtcacttttatttgtaagttttgatttctttaattaaatttttaattttgagataataatatattcatatacagttgtaagaaataatgcagagaaatcccatatatcccttacacactttccccaattgtaacggtttgcaaaaccgtagaacagtattaaaaccaggatattgacattgatacggtcgagatagagaacatttccttccccacaaggatcctcgtgttgctttcttcagatctttaaaaattaaagatttttgaaggaaaaaggaccctgttagatttctgccttgaaacgatagctatcactaaatgaggcactgtcccagctgggctcagtggagttcacacagaggaatggtcccctaggtcaggagtagcccaggtggaactcacctcagccagggaggcctcaggggagcacagctttgcacatcagaaagaacctgagaacagttttcagtttgacacttgcagtgtggcctttgatccctcaaacaaggacagggttgtcaagaagggaaacagcttggctgggctcatgtgggccacaggggcccagttatcccaggaacagggataactgttccttcctagagtgtagaactctggggcacagccctggcagcctccctgaggacatgtcatgggaccaacccagttccctggtgagggacaggcggcaggtgtgggtgaggggtgcccttgactgaagcctacctggcatgcttgaaagtaaccctatgcaaatgaaattcacaaggtgcctccctgtttcaagacatttgtctcacaccagagctgcagggaacttgggaactcatctacagcaggtattttggatgaggactgattctgagatagggaaactcaagtcctgaagatcagacttaagtggaggggaagtcaggccagagaacctggggtgccctgctctgagcctgatggctaccctgtgacatccagatgccttgttcaagctgcttccactgagggttttgggttttgctttttttttttttttaacggagtttcgctcttgtcacccaggctggagtgcaatgtcatgacctcgcctcactgcaatctccacctcccattctcctgcctcagcctcccgagtagctgggattacaggtggctgccaccatgcctggctaatttttgtatttttagtagagacgggtttcactgtgttggccaggcttgtcttgaactcctgacctcaggtgatccacccgccttggcctcccaaaagtgctgggattataggcgtgagccaccgtgcctggtgtgtgtgtgtgtgtgttgtggtttttgttgttgtttttttttttttttttttttttgagacagagtctcgctctgttgccctgactggagtgcagtggcgtgatctcggctcactgcaacctctgcctcccaggttcaagcgattctcctgcctggaaaacaggcatgcactaccacatgcagctaatttttgtaattttagtagaaatggggtttcaccacgttggtcagactagtctcaaactcctgacctctagtgatgcacccagttcataatcatttttaagtgtacagtccagtggcattaattacattcacattgttgggcaaccatcaccactatccatctccagaaccttttcatcatcccaaacagagactctgtacccattaaacaactccctgttcctccttccagtccctggtaacctgcattctactttctgtctctatgaattggactactcctggtacttcacacaagtggaattatacagtatttgtccgtttgtgtctggcttgcttcacttaacatgatggcttcaagagtcacccatgttgtagcatgtgttgctatcattgactttttgattgacacatgcaagctgtaattttttgggggggttcctagcatcacaatatattttaaaggtttggggatgcattagtccacttttgtgttgctgtaaagaaatacttgaggttgagtaatttataaggaaaagaggtttaattcgcttgtggttctgcaggctgtacaggaagcatggtgttggcatctgctcggcttctggggagggcttcaggaagctcacaatcatggcagaaggcaaagtgggaggaggccggtcacatggcaagagaaacagtgagagagagatgagtggggaggtcctagactcttttaaacagtcagatttcacatgaactgaatgagaaccaactcatcaccaaggggatggcaccatgccattcatgagggatccaccctgtgattcagtcccctccaaccagaccccacctccaacactggaaatcacatttcaccatgagatttggaggggacacatatccaaaccatgtcaggggacaatcagtcaattttgtggcatctcaatggtgtgtgtcttttgtgtaaacattgcacctgttaatgtgtatgtatatgtagagggagaatcaacatttgtctttaaaagtgtatttgtcttcaagctctgtgatctgaaatctgtcatactgacatgaggaggcaaaagtgaggtcctggtggcgagcgggcctcgggtatttcaagctttaaggctccactgggctccctgggggccgtttcttccttgcttcttccttgcctcctgtcataggattgggctactctttggacctgattccaaggcagctctgaggaaaacaaaccctcagctccctgaaacatagatgacctttttaaaattccaggttcatggagtgcctctctccagatggccccaaacacttccatctattaactcgtgctcattcaacgtgcagcagaggctattgatcaccttccctgtgccggggactgtgctaggtgctgggaatacaaagatggggagaggcctcgatgcgattcccgattcagaggcaggtggcaaatgcttttcccacagtgagggaagggctgtcaccgcgatggtgctctcagggaaccaaggttcacacattcagggaattcggggcactgagtcagcattctagactctgccaggatgaggaggagcaggggactcagtttctttacatgcagaatgactgtcccctgccctgccccactggcataaaatgtcctcaacatgtaagaagccctgggcagagatagtgtccagggtgtggtcagttgacgtggcctgtcagtctttggccacgctctcaggcccccctcgctgtggctgtgtgtttgcaggcgcccctcagactccaactggaatgtgtccgtgatggtgggaggccgggctgtggtgctcctagtagggctatggtggcaagctttaggaccttgtgagcctgattcacccggtaatctccacctcggaacgccctttctccccgctgcagagcatggggctgggggggagtggagagaaccctgccttgtaacagggcagcggacagcaggtaaattgccttccccgggagtagcgtgccgcccggcaggggcctgggtgtgccaaggcccggctctggggatttcaggacccaggccagcgctccccagcagcagggcaggaggcagcctgagagtcggcagccccgccttggagtctgagcactcgcgcccatccgtcaaccttgcagagcattgcaactttatgcctacgcataaaaactggagggactcgtcccagagtttgctgccgccgccgccgctgccattagagcggttttaattagctgcaggatttttaatgagctgaaatcaagaagagccccatctcagaagtaagcgagagccgcgcgcagggaagaactagtctgacaaaacagaaggaggtggtgctctcgggggactgggctgtaggctcccaccgatcgatcggcgacgagcagatgagttcccgaggccaggaggctgaggagggaagccagggctcagagaccagcgcccggtgcagagtccccgctgctgccaccgcggcagaaggcacggtgccggattcaaggtgacggcagtgcctggctccattctcctcaagttgccatagcagcctctctcccaacaagcagcttctccgggagccctcagccgggagggacgtcattgttctctcctgcccgtgtggtgcaaggagacccaccggacagagaactttcccgagcccggggtccgctgaccacgtgggtgcacccatgctgcctggagccaggcacagggacaggtccccacggccacagggaatcctctgggcagctgaggggagcgtccaggcccagaagcagctgcagccaagcgtgtccttggagccgtccatgcgtctgtccgcctgctgccggtcgccactggaggtgcgtgtgttttggctgaattcccaagtccttgcttgtgccctgaagtgaatttcttcaaagagacacatttttaaatcaaataaataaggaaatgggaggaatccttcgccctgccctgtgtcccaggaggggtttataagattaattggatctttttttttttttttcttaaagtaaaaattggtgacgccattcaggcctgggggagaaaagccaccaggaggactaggaattgtgaggccaggcaggagctgctggaaactcgctggggctgtttatttttcttgcctgaaccctccctcttctctgcccctggaaggctggattttcttattgtctgttggtcttgggatgggtgtaagcaggtgaaggcaggttttgcccttgtcatcggagctgagagtgatatagtctgtgatgaggatgggacagtcccaggtggaggctgaggcctgtgactgtgtttatgcctcatcccccagccttccaggccccagcctgtgacagatggtggtgtccactccccaggcagcagctggactcccaggagagggagacagacagctcttagaccagcagctcctgttgccttgaaaacaacgtgcgacttggaagcctggggtcctccgaggaacaatagaggattctacaccccctggaatgcccggggatctgtcggtgaccaccctcccttcccacaccttaggggaaaggagtgttctatagagtccagttggccagccatactgctggccagttacccaggaggggaggcacgctgaccttttgattcctgtttgcacggagcagggagttagctggtcagatggtccccagtgagaacaaacacagagctgagggtcccagagggaaaagctggggtctgaggcttaggggctaaaccctgaagccacagacggctccaatgccagcttccctgggtatagagagagggtgttcgtgttctctcgggggccagcaaaggcagggtctttgaaaggggaaacgtgaacagatgaagctccaccaccatggaggtgtggtcctgggtctgtgtcttcttccccttcctggatttgggggcatggatctggtccttgccctggctcccaggcacatgggtggctggagccaggcatcatggggtgggtttggtttggggcggttcagaaacaagtgaggacaggtcttcgctgcagacccatttagtccttgacagtggatgtcggtactggctcgaatggagacagactggggagaagagaggaccggccagctctcttgtaaccactctgcagcgccagctactgaacaaatgagatgatgatcacacatgctcccgagtcccctttgttcatcaggtagagcctgatattgagggacccattattagctgttttaccaggcagttctgggcgctagccatgaagctgttctccttcctctctccctccttccaaaatgtcttgatgttggaggctaccctaggtcaaactggcttcccggtgtctgactcaggaggctgcaggaagcgcacccacaccgtggccagcttactcaggggctcgcgacagttgctttccagctggggccttgctggggaccatcgatggtatgtgtgcaggcactggccggcatgcacccgggcatgtatgcatatgtgtgttattgaacccgcgtctgcttaggtccgtgggtgcggtgcacatgtgaacaccgtccccatgaccgtgcaatagcagctgctcccgagagaccttgcaggttcttcctggtccccatctgagagccatggcccccctgtgtcggtgcgtgacatcttttccattcttctaactcctttctatgactgcctggggctcccccgagtgaggctggagagaacagctttgcctgccttgtcagctgctcactctctcctgaggctttggggctggccccggtggggctgggactctgcagtgcagtgctgtcctcacagagggaagggcttgggggacggtagggcatcgcagcctgctgtggggcttacagtgctgcatctgtgtctttgcaaggcagtgaaccccaggtcctcaggatggcctcatccagggcagccatggagagagaggccccagccccgcacaaggggctttgagtctgagcccttggggacacatgagtgtccatttctactctttgcaggcaaggcaggggtggcctcggtggatgacaggaagcagcagtttgtctttagggcagaggccattgcagtgaggtcggagccagcctgacaccccggagccagctccagagacaaaacaggcccagctcagtgattctgtaaaaagctggaaggccgcaggaaccaactgctcggcacagtccagatagcccagcgtcaggtgccttcccggtgcggagaggcctggggcgggttaattaaagttaactgagtgaaaaaataattatagaaactgcagaggggagaaacccaaacctgcaatttaccctccctagcccttgagcttttcagaaccatctggtcgtggggagtcgtgggcaggggagcagggagagtgcctcttcccatctctcatgctccatggactgggtgtgggggcttctttccccagtgcctgggtccgtgttggggaggagtcacccggctgaagtattgtccctgggcagggagatgtccttgggccgagcagcatatttgacctggggcttaaacagccacccagctgtggcctcagaggctactgggagctgcctacctggcctcacctccctcaggcactgacctgtgccagggtggggatgttccctccagcgctcttgggtggaaaaagggtgatcctctcggcctagccagcaaggcccgctggaaagtaaggggacagagtgactgaccttcaaagcggggttggggggtccctagagtgcctgccgcctgtggctctctccccctgtactctgcccatgccctctctacacaccactgcaggaacttatattcttcctttgggcaaatggccttggggtgcccccatctccatgcacagcctggccctgttggcgtgactggctggtatgtgggggatggggaatttctctccctgccctctaggaggaagcggggtaaggggtgagtcacatgggtatactctgggtctgcagtggctggagcagttagtgcccacccccaggaacacgagggggtgttagtacccagcctctgcgcctctgagcttggagtctgttggacacaggtctagctgccccacctccactccaggcaaagggcctcgagcacagggactccagtggtctggccagagcctcagctccctctggtgtgactgtccagagggactgacatacgccaacccatctgtcagtccatcagtgaggacagccctggctgtcacaggagagtccgtctgtgcttgaatatcctttgagcctagcaggctccttttcagagctgcctgctctatggagaccttgtccccagtgccctacagagagaagcagggtggaggcacatccaagagcttctctgcccaccgggccgggtaccagggacaaggacccaggttcccgccagtacctaggcccccgccctgggagcacgcatgcttatttggaggcctggacagtgcagggggtggctgctggttactgactgggggcctggaggttcccaactgggctccccaaggcagggccagagggtgtctcattccatgatttgtccagaggtgcagatacaggagaccctggtggaaagctagcattccagccacaggtgggaacaggcttccctcagcctcctgggtgtgaaaggatggaaagggcacccctgggtaacttgtagagggcagagtcatccggggattgcacttggattgctgcagtgagcagggcctacacctgcccgggtgcctcgcgcctcggtgatgactatccctcctctgccccgtagatctcggcctgatggacgcctggtgtggacgatgagggaagaacgtgccccccacacccaagaggtgacccctgagccagccccggatgaccctgcgacctggaacaatgcggctggcctgcatgttctcttccatcctgctgttcggagctgcaggcctcctcctcttcatcagcctgcaggaccctacggagctcgccccccagcaggtgccaggtgagtccttgcgctgagtcctgccatcactgcccccagctttccagcctgaagctcaggcctccacagctgccctggtgtgctgggcttgggggaaaggggcaagtctgtgccaagacccccggcaggcagagtcctggcttcccggggaaggcgttagtctcaatgtgggagtgctgtgtctgatgcaagacctccagccagtgcctagcagcagggtggccccttttgggagtcatggcaaggctgctgtctattgagccagttgttgcccttgatgaaactcagatttaaacaggattccaccacctctcaggcctcttccacattgtcagggacatcagaaagtagacaacttctccctgagcccatgccccacaagcaagactcagtttccctgcccagccctggggaatctagcctctctggtctggacaaagggggtcagggtacctcctggtttagtgaggccaagaccccctccgagggtcccccactgctacttccattccacccctgcctggtagcccactggagtcacagagggctgctgggaacaggtgggatggcagggaggccagagcaggaagggtgattctggcatctcagggcagacggagtgtggagagggagttcaggcaaggtttctgctgccgggacacggtccccatccccagagatatggaaggacaggaggtcagctggcagggtgccaaggcctgggaactctctgctttggagggagaggaggggaggtgtctcagcagtggcccctgttaggggcagttccatgaagccacacactcacagtccacatgctctagggcatggacaagctggtgcacccccagagacaccgctcctctgcagggacacccactcactctctcttgcttgctcagtgctgtgatccagagacaggatgaaagagaagggggccagaggtgtaggcagaggggttgctgcgtaaatccctgccggaagcccagagcacaggaaggggtcttactctgcaaccgctccgcccccattatggacgagcacccatgatgtgtggcctttagtgcagattgagggcctgtgggcaccaggaaggaaggtgaaaagagcacaaggaggccagagctggggccctgggtctggcagctgccagaggctccccatgggcaggcgaatgagttgagagtcagagggaggcagccaaggcggtggcctccaggagatggtgggcgagtcatcggtgctgactcacgcctgtgccgggcccccacaggtggtggctgtcagaagtgggtctggccgctcccaggcgtctggagcagcaggtgcgcagcagagccggctctcctgtgggagctttgcagcctcacatgagccccagaacagctcatgacactgcattggcagaacagggcccctcgggacagcgccaccagggcagacagcgagctggtacctaaggtcatgtgttatctgcatagaagcacagtcaggaagaagggcgagcaaacgctgactgggtgtgtccttggtgtgtgcgtggttgggggtgcatgtaggcagagggtccaggcggccagtacccacattctgcaggaggagcctgggagaggaggcatgagtgtgcctgtgatgcccacctgggaccagggcctggacccatcggtgggacactcctggatgggactgtggtttggtggcttcagctagtgccctgccctgccgcagcaagagtgctcactgcgcaggtccctgttgccctgcccagcttcccgagtgcacatacgtgtggattacaggtgggctggggacccaggggacggctgggatttctgggaagatcggatcctcaggctggcaggggatgtcagatggcacggagccgaggccatcatccctttgcagctggcagacctggcaaggagcacacgtgggtcttctgatggtccatgcagccagaccaccctcaccacgtgccaggtgatgggcagacttgacggtctgggtaaatcacaccaaacacagtcataaaactttaagtaatgcttacgttactttccctgagcaaagtgcctctgacacaggctgtttgtgttgatttgttactattcatttattccttccctgtacttctcacggcagcctaattgtgattcggtaccaagaaagcaatatcaaagtaattttccacaacattagttacattttcttctgatctttcaagtgaaacaatcccatcctgttggcttctctgagcatataaaccttgattacatttatctgttggaaaccagtgcttacaaagtgtatgtgtccagttgcatggctgggtggccccaagggcccttgacaattctccctgtgaatttctgttggtgggaggaacacattctgggagttgccctgccatcctgatcaggcaaacaggcaggtgttggggtggagggctgggagtggagatgagcggatctacggaggaaattccataccatggcatgaactgtcctggggacggagttctctgggagctgcagtttgtggcacaacaaatgtagaaaggggatggggagtggcgggaattctgagttgcttgaggtcccttggggcctggcctcattcacgtccctcccacgcagccaccggatattaacagcacctgaactttacatggatcagccagccaagctcacctggctcaggcagtagatggaattgtagggggttgccagacttttgtaaatcaaaccacattttaaacattttttttttactacagtccaaatcaaatctttggaaacaggaagagctacccagtaagctatccgatgcgaagatgaagttttgtgtaacagagaattcacttctccagttataattcttttccagtctccaggattgccaggccctgaggccagagcttctgctttcaggaaattcactttttgacccagtagacaagacttacctcttctccaagagaaagacttggagaccaggccagaaccaggaataacaaacaccaatggccaggtgtggtggcacgtgcctgtaatctcagtactttgggaggcctgggtgggagaatcacttgagcctaggagttctagaccagcctgggcaacatagcaagaccctgtctctacaaaaaaaaataaataaaattagctgagtgtagcggtacacacctgtagtctcagcaacttaggaagctgaggtgggaggatcctttcagcccaggaggtcgagactgcagtgagctgattgtgccactgcgctccagcctgggtgacagggccggactttgtctcaaacaacaaaaaattcccaatgtactggctctgggggctgcagaaggctgactccacatttggtcgagcaaactgaattttacgagctgctttctttgtgaatgttttatcatagcgaatttggaacacatgcagtagtggagtaggatagtgccatgaacaccacataccgggcacccagcaccccccaccaacaccaggctggccccatccatagcaccatccacttccctcctttcatgtgatttttgaagtctataccagacatcctatcaattcagctataactatttcttttttctttctttctttttttttttttttgagatggagtttcgttcttgttgcccaggctggagtgcaatggtgcgatctcagcccaccgcaaactccacctcctgagttcaagcaattctccggcctcagcctctcgagtagctgggattacaggcatgcaccaccacccctggctaattttgtatttttagtagagacagggtttctccatgtcggtcaggctgatctcgaatccccaacctcaggtgatctgcccacctcggcctcccaaagtgctgggattacaggtgagagccaccgtgcccagcctcagccataaatatttcaatatatttctcagtttaaaagataagaactgttttattgacatcaccactgaactcattccttaataacatcaaatttaatgattcctcaatagcatcaaatagtcagtcagtgtgcaaatgtctgtctcacaaatataattacctttatttccaatttgttccatccaatatccagaaaaggccctcacatggcagttggtggatgagtcttttaagtctcctttaatctgtaagtttccttctccatctgtattcttctctcactatttatttgaggaaaccaggtcacggttcctatagaactttctgtaaattgagatttggctgattgggcctgtctgataaggattcacgttgttctctgttctttgttgtcccaataaattaggtgaatcttgaagcttgatcagatacaggtttggattggtttttgttttcttctaggggagttttgggggacaggaattcatgggtggttctgtattattccatcaggaggctcctgtctgcctggctgtcttatgttatcagccgccagagatcgtgcctagatccagccattcattaggggttacacagtggcaatgttctgattttatcactccttcttcattcttttaagtggaatggattttgttttaatggggcaaggtgagtcattgtcagtgacccatgaagccaaagtgagtggtgtggattgattggtttattcatagatatgtatataaaactacaatgttaccatacagattctgttgtagtttattcatatatatatatatatatatatatatatatatatataaatgcaatgttaccatacagattctattgtagtttattcatatatatatatatatatatatatatatatatatatatatatatatatataatgttaccatacagattctcttgctggcacactgtaaatagttcgttcttttaatgtttggcttttgcagagtgagttttctttaagtggggctaccccatgtttcagagccctttgccttttcctggagtcaaggagttgtgggtggtggttctagggtgcccagtggggaggcagctgtggtggacagcaaagatccccctcagggacccctggcacagacaatgggattggacagcccccgatgactcctaggtctgtggcctgtcttggggcactcctgcagggcatggggaaatttaacgatgaagataataatgaatattgactgaacatttaccatgggccaggcctcgtattgagaactttacttttttgagacagagtctcgctctgtagcccaggctggagtgcagtggcatgatcttggctcactgcaacttccgcctcccaggttcaagcgattctcatgtctcaacctcccaagtagctgggattacagctgtccaccaccacacctagctaatttttatctttttagtagagacggggttttaccatgttggccgggctggtctcgaactcctgagcttcaggcgatctacctgccttggcctcccaaagtgttgggattacaggcgtaagccaccacgcctagctttacatgttctaatgcatataatttcccttcccttccctcccttcccctcccctcccctcccttccccttctgttcccttcccttcccttcttgaggcagggtcttgctctgtggcccgggctggtgtatagtcttgccatgaaagctcactgcagctttgacctcctgggctcgagtgatcctcctacctgagccgctgagaccacaggcagacgccactacacccagctatttattttattttttatacagacaggatcttaccatgttgcccagactggtcttaaactcctgggctcaagtgatctcccgcctcagcctcccaaagtgctgagattacaggtgtgagccaccacaactggctaggtatgattcttacaaataaacgatgtctagtttgagacaatgtgccagcactcactggggcagacacagaagtagcaacaatactgatactagctaatgctctcaggccctcgagatgagccaggcacaatcacaagcacttttcatatatttaatactcatttactacttttaaaatttcaatagttttgggggtataggtggtttttggttacgtgggtaagttctttagtggtaaattaggagattttagggcacccattcgtcacccaagcagtgtacaccatacccaatatgtaatcttttgtccctcaccccccatcccagccttgtcccctgagtcccatagtctattgtatcactttatgcctttaggtccccacagcttagctcccacttataagtgagaacatgcggtatttggttttccattcctgagttacttcacttagaataatgccctccccatctatccaacttgctacaaaagacattattttgttcctttttatggctgagtagtattccatggtgtatatataccacattttctttttctttctttctttctttctttttttttttttttttttttgagacagagttttgcttttgtctcccaggctggagtacggtggtgtaatctcagctcactgcaacctccacctcctgggttggagcgattctcctgccttagcttccttagtagctgggattacaggtgcccaccaccacacctggctaatttgtgtatttttggtagagacagtgtttcaccatgttggccaggctggtctcagattcctaacctcaggtgatccccccacctcagcctcccaaagtgctgggattgcaggcgtgagccaccgcacccggtcaccacattttctttatctgctcattggttgatgggcacttaggttggttccgtatctttgcagttgtgaattgtgctgcaataagtatgcatgagcatgtgtctttttcatatgatgagttttcctctgagtagatacccaggagtgggattcctggattgaatggtagttctacttttggttttttaaggcaggggtctccaacccctgcgttaggacccaggccgcacagtaagaggtgagtggtgcgcgagctatcaaagctgagctcggcctactgtcagatcggtggccacattagagtccagaagagctcgaaccctcttgtgaactgcatatacaagggatctaggttgtgcgctccttatgagaatctaatacctgatgatctgtcactggatatattacatgtaataatatatccatgtatatacattatatattacaatgtaatagtaatagaaataaagtgcacaataaatgtaacgtgcttgaaccacctcgaaaccaccacctccccacccccatctcccttccccagaccgtggaaaaattgtcttccacgaaactggttcctggtgccaaaaatgttggggaccgctgctttaaggaatctccacactgtttcccatagtggttgtactaatttacattcccaccagcagtgaaaagcgttcccttttcaccacatccatgccaacattattgttttttaagtttttttttttttttgagacggagttttgctctcgttgcccaggctagagtccaatggtacaatcttggctcaccacaacctctgcctcccgggttcaagcgattctcctgcctcagcctcccaagtagctgggattacatgttctaatgccaccatgcctggctaaattttttgtatttttagtagagatggggtttcattattttggccaggctggtctcaaactcctgaccttgtgatccacctgcctcagcctcccaaagtgctgggattacaggcgggaaccaccttgcccagcctgtgagccttttgagaaatgtctattcatgtcctgtgcccactttttgatgggattatttgtttttctcttcatttaatgctttatttttatttatttattttttgagatagagtctcactctgtcacccaggctacagtgcagtggtgtgatctcaggtcactgcagccttgacttcctgggctccagtgatcctcccatctcagcctcctgagtagctgggaccacaggcacccccctcttcacacccgtctaacttttgtatttttggtagagacggggtttcgccatgttgcccaggctggtctcgaactcctggcctcaagtgatccacctgcctcgtgctcccaaagtgctgagattatagtctgagccactgtgcccggcctcatgtaatactttaaaacccctatgagtgaattattattacaccatttgaaaaatgagactattgaggtaagagaggctaagaaccgtacccaaggccacgcagcttctgggcttcagagctaggatgtggcctgggcggctgcctgtggttcactgtaccacactgtctgcccagcacttggggtacccagtattgttgtgttccggacctggagcagagcctgggcagagagaacagtgtggataaaggattggagtcctgagagaatgcggcacgtggagaactttaagtgatttaggggctgcagcatgacctgtggatctagactcctggctgaagacacagccggccctgggcccagcaggcccttgcagtgtggtagaggatccagccttggcctctggcaacaaggagctctggggaccccggagtagggagtggtgcatcagaaagctcattctgggctgggcgcagtggctcatgcctgtaattccaacactttgggaggctgaggcggtggatcacctgaggtcaggagttagagaccagcctgggcaacatggcaaaaccccgcctctactaaaaatacaaaaataagccgggcgtgatggcatgggcctgtagtcccagctacttgggagactgaggcaggagaattgcttgaactcagaaggcagaggttgtagttcttttaaaagaactacaatcctttatccagtgagctgagatcgcgccaactacaatcctttatccagtgagctgagatcacggcaactacaatcctttatccagtgagctgagatcgtgccactgcacttcagcctgggcgacaaagcgagactccatctcaaaaagaaaaaaaaaaaaaagaaagaaagaaagaaagaaagaaagctcattctggtggctgcctgttgtgtggccgtgggcagagagcagacagggagaggcaacaaatgcaaggagattgggggcagccaaggatatcgcatgcagtgttggagacctttcaaatgagaggacaaggaggtgaggagggcggggagggcagtggtcttggttcagggggacttgggtttctggctctagaggagggaggttgggggtgccattcactggggcagatgtgccagatggggagaggtcggggcaatggggcaagagatcacaggttccatttggggcttatggtgtctgagatgcttggcagggtgtgtggagtctccctgtagctcctccaccgaggggtgtccagccccacagaatgaaggaccaggcaagacaggcaggaagcccccaccatgccctcgcccctctgcacctgcgtttccactcacaggtcgacacactcactcctttaccctcatacaccccaggcctggacgctggcaccatgcagggtggggagggctatgggagagccttgccctgggagaggggctggcagctctggacttacatctactccacatttccaggccaggaaaccagtatcctggaagctgtccctgctccccgttgggctggatgccagcatggagattcatgcttttcagcccaaacctcacattgtcctgggatgggacctccatgcctgggtccctgggcttgccagccacagggagagatctgtacatgcccatctgtgtgaaggccctgcaagcccagccgcttagctgtaccgaggcaggggaggggtgcacagggagatggagacacgggaggaggaagctcgggctctgctctcgggagctcacaatctgtgggggtcaaggaaggaggttatccaggcccttccttacagggttcccaatctgggggcagtggaggggagacctggccctggctcagcggcgcctgggggacacttaaggcaggttgtaaacctttcttgagaggtgagtgctgaaggagccaggaggacttcctggaagaggggaactgtgggctgcttgtttgtcctctctagtgaacaggaggtgctgacctccaatggaagcagtgaagcgggcttgggtgagattccagtggagccaggggtctccctccgcagcacgtgctgctatgcgtcatgcctaatatctcacagctagaaatgaatagagccagaagtccaatgcccgcgggtctgcctgatgccggggctcttgttttgatgtcctggaggcagcgctgtgttgattggagaaagtgtggccttcactctgcgtcccagggttaccagggacacactgccctgcctgtgcctgttcggaggaccaaactgcaatgtcagaaggtctgtccagctcctacagtgactgtcatgttctgagtgtgtccccctggagctctgagacaaatgccaggacaaatgtcgtgggtgggccaggaccacaggagcgcctgctaagaagctctcaacagctcacccaaaggagggtgatagaggcaacagaagtgcagcggccacccctacctgctctctctgagcagctgggccaggttggctgcaggggaaatatgtctactggccctctcagagagagtccggtcctcgcgcagctgggcgtctaagcccagactccttcctgggctggtacctgcccctccagtttccatggagccggctgctttccccgggcaggtgggttttattggaaccctcttgcgtctgtttcctgaaaccattttctaacggcattgcggaacatcatatatatttcctacaaaccttgggaggctgacacatccttgttgtgactgtgaacatcagaagtgacatgtaattgcagtgatccatcctgttaagtagctggcaatacattatctcaaaatcagcagggctggaactctcagaacccagtgtttctaaacaatgcacctgcagcttcaaactctcttcctgaacagcgcccaaggctggcaagggccacctcgccctcccatgcctcacttttcctgggccacagcagagacaatttcactccagggaaagccacctactgggttttcagtactcctggagtgccttctccttgtcacctaatgcaccaggctctccgctcagggctgtgggtggggtccttgtcacagtgtttcttccaagcgtggctctggaagtcctgccctccttttttctcataaactccagaatgtcttcgtgggggttcctcctaggccaggccagccatcattatgcacaattggaggtggggaggggcagagagggtggccagagcccaggggcacagaaagccaagccccagttgctactttgcacccagcagggacacacccacactgtgctttatgctaattctggggtatggttcacatagattgcagtgtgaagggtgtcccctggagttgtgcaaagaccagtactgatggagggatggacatggagtgctccttgcgtggtgattgcccaagtgccagaaataggcagggtcggaacatggaaccttcaggtctggataccccgagcctagtgggtttgatgcgtctgggcggtgctagctttgggaccatcattgaattctgctgtttgagggtgggggtcatgaaggaccttcactgccacactccctgggaggccctgatttggagggggagcccactgtggaccctgtctctgcagtgaaagtttctcagttcaagcctctctcacctgagcccaggccgttccccttagcagtgccatcctgtgtcttcccagtcttctacgtggccacgatttcctgggttcctccaccccctgcaattggagtgaatattcgcctcttcctgcagaagacaccctgggggtctctagccagagcctcactttcctttggtacattaaaatatgctaaatgaaaaataatgagcatgtaggaagtaataacaggaatcacctaattaaattaggaaacagacatcacatcgctgtaatctgaaaattgatattaatagaaacggtcccagaattgttatgctaaaagttcctaggggcggggaaattaaaaaggagagcagaatagaaaattgggacaatcatgtccaataagagtgagacttatgttttaaaaggaactacagtaacatgctaaaaatagaagaggagatctaatgaagtcatggacaaaagtggctttgaaaaccgcagagctccaacgcacgtgtatgatggtaatttataaaatgagacaatgtaatcaagcttcaatgtgcatgaaatgtagtcagggttattgtttattgggtgcctggcacgtggtactcattctattttccctcgccctcctcggcaggcgtctttatcctcaactgaaacttagggagattcattcatttacccaaagtcctgaagcctgcgtggctcagccaggatttgaccccagatctgcctgattccaaagcctgtgctcccccttctctgtccttctttccttttgctattagttaatgtcatggtctatatgtttgtttgtttgtttgtttttgttttttgagatggaatctcgctgtgtcacccaggctggatctcagctcactgcaacttccgcctcccaagttcaagcgattctcctgtctcagcctcccgagtaggtgggattacaggcatgcaccaccactcccagtttattttgtatttttagtaaagacggagtttcaccatgttggccaggctggtctcaaactcctgacctcggtgatccaccacaggaatccacctgccttggcatcccaaagtgctgggattataggcgtgagccaccacacccggcctatgttttgttttaaggtaaggggtcttgctctgtcacccaggctgcagtgcagtggcatgatcatagctctctgccacctcaaactcctcgatatttcttttcttttctgatgttattctaccatttttctcaaaggacatttcttgccaacacccagcagattgtggcaactgtcagctccccaaaccgaagccccaaggctcttccattggttgaattaataaaacctacaacaaagacaccttctgaaatttcagtccaactggaaaactgggtctcccattatgtgggggcctgggcagggtccaggaggggcaggcggttccgatgcttgtcctgcgtccccaggtagccccagtgttgggttgcgtctccacagtggccaattgttccccagaggacccccgagggggatgaatctggctctgttcacctgccgtgtgagtcacagcccagagggcccagagcaggtctcaggtgtggagtgaccccgttcccactctgcctggcccagaatgcattggagggaccgggggaggaggaagcggaggtcacaatctgtgcatgagatgcctcaggattacctcgggtctggagtgctgggactgctccgagggccaggcattgagcccaaggaggactgaaggctgggggctggggagggatgccacatggctggacttcttttccctcctcctgtgcctacacctcccccacctctgttcccattcactgcctgagcatcttcagtgagagtcacctggcatcagagccaagcctcccgcacagcccagggcagctgccgtggagaggtggagggcaggggagactccactccccaagtggcaccaggctccaaagaggcccgaggtagggggccctttgcccggctctgtccccttcccccagcctcacttggcctggagtctcagggccaagggggagggcctggagacatccagtgggttgaaacggggcacacccactgccagcatgaagaagggcccggtggggtcccaccgtgtgccaaccctcctgatgtcctcgagcccctgttcctaacacaggcagcagggaagtggtgaggagtccacccacgctccaaggacagggctgttgctacgattgctgtccttctccatggccactgcgtaggtcttggttttttaaaactctgaaaaagttacggtggtagttatgacaacagaagcctggaggtccagttctggaggccaaatgcgtgggtcggtaggggcgggcgcgggcccacacaccctggggctagacgcaccttctgctgggctccaactgcctgccggtggggttatcccgctcttgcattgaggttgacaccatttgtggtgcctttagggtcactgcagatccccctctccttctcacaatatttgcagaagttgggagcctctgggcggatctcatttaagccaaaaaagcttcaccattatatgcctgctgatgttttcattatgaagcttattttccaggatttgtggctctgcagttttgacttgaatcatagtggaagtcagtggaagattcgctcattttgaaattttattttatgtggggaaaatagctgagcttaaatcggttcagttgtgccctctgacagctgccactggggagtccctgcacagcgcaggctcctagtggggggtggaggagctcctgggggcttctcatgttcgcgtctggggtcccagagggaagtcgggggctgcctgtcatcttgccctcaggcctggatgaggcatttttcagccctccccaaaaggcctgaagacttctgagagggtgggctggccccatcctagctccccaccaagctctgtgcctggtcttggttttccaccagggcgggactgcagggatgatgatccgtgagcccctcactacatctggttgtgtccaaaggtgcttcaccatgggaaggctgctcctggcattcctcaagtcctggatggagtcccaagaccccatcccacctcctccaaaggctacagccatttatgagtgcatttgacctttgccctcagggtctgggtctgcattggagggaggggaatgaggagatgtccatgggaactgtgcagggtcactgggatccatcagacagtaggcctgacagagccacagggagcgggagaccacaggatgggggaaaggggatggggtgagggggaagtggacagacaggccccagggccaggggccaccgatgctccactccagcccagagctctgtgcaggagtgtaagtccagggtggccaggtcatcctttttgtttttgttttgttttttataaaagctaagaatctggccaggtgcagtggctcacacctgtaatcccagcactttgggaggccgaagcaggcggatcacttgaggtcaggagttcgagactagcctggccaacgtggtgaaaccccatctctactaaaattacaaaatttagccggagttggtggcaggcacctataatcccaggtatttaggaggccgaggcaggagaatagcttgaacccaggaggtggaagttgcagtgagctgaaatcacgcactacattccagcttgggcgacagagtgagatgctgtcttaaaaaaaaaaaaaaaaagctaagaatcggtaacatacatttatgtggattctcctgattttaaaggggcagctctaatttggaatgtgttttttaacgttagataataggtgatgtttggcacctactgttggttggatgggctgggaggactagatctttccaataccctaaacccccgtagggctgagacctgccccctaggccctatttggctccatgcctgctctccctataccccctgggaggacacagaggaggtgggtctcctggtgggaaggggatgctaagaattacttccagccccataggacccccatgaagccagaccccaagcggtccatgagcagagcatctcctgggctccgctgaccaacagtggctgcacagagcccctcagtggcattgtttggttcagcagccgggagccctgccagatacctgttcactgttcaggtcaggcaggggacctgaggggtcggggaggtgactggtcagcagagatacagggaaggcaagggccagagagtggggttctggggagcgcacctaattaaaacctccttcatttacgcacagttactcacatgcaaatatttgcacccactgacaagcttctgttgctgtagcaaaggaagaatcaattcaagcaaagctttcctgcgagtgggcactctctccagtatctacctggagatgcgggtgtgggtgcccgtgggtgtaaatggaggaggatttctgacttggcagcctgcttcccacagtgatggggtgtggcaggcatggccaccctggctccctttctgcccccctagggcaccatggcagccacactcagcaagggtccctttggagaggggcctggcctggcccagcaagggactctgcagattcgccttccctgctgcctctgtgtcacagcgatgtccccagtactaggagagggacccaagagtcctgagagcattcaaggaggtggcatccaggggtgtggtatgggcaatgatgatggtgtgagcactcagtgcctactgtgtaccaggcactgtgttttacatgctttaccaatatcctcatgccagagcctcgctgtacccgtctctattttatagatgaaaaaactgaagcacagagaggcaaagtcacttgcccaaggtcacacagccaggaagtatcagtgcttgaactaaaacccggttcctcagatcccaaaagtctgaagtcttcttggtgaccggacaaccactcagggctgggagcaagcaccacactatgagatgcatggcattggagggccagcctgggttagaggttggggagctgcacggcactgcccttcagactgtcagggcgtgcttcattcctgctcacagcagacatgttctggttcttgtgcacacgtgtgtgtgtcctgatgaagagtcaggtgcccatgtgtgtgcatgtgtgtgtgcatctggccctcacccataatcctagctgtgtacaagtatgtgtgctcacctcagtattactatacacccatgggtggacagatgccttacggttcatgtggaaagcacttcaccctgaagtctgggctggctgctgtgagcgtaccctgacaatgtcacctgccaggtcatggggcaggcaggggcaaatgacttgggccccacagagtgagttgtctgtcggttgtcagccacaggattgggtgacaaattgccattccagcaggcactcagcaaagccaattattgtaaccccttgcccacgacccgcacagaccaaataatgaaattacattcataatatttcaggtcaagtgatcgctgcttgaattagttccttcccagaacccagccagaagtagcggcagtaattaaaggattttctgggcttaaatcaactgtgcgcgtcaagcgtgtacaacacacagagcttgcaaaatgtgtgcaggcctcgtcccttcactggggagtgaaaaggacaggccatgattgtgggaggaccacaggccgggaggaggtgtgttattcctgccagggaaattttccactttcactcacttattttagagacgtttactgaaagatccctgctccaatggggcctcacagtgagtaaggtgatggggactttctggggtccaccctgactcctcccaagcaggtattttagcagtgttgcaggggtagggtgctgtgtttcccagactaaagtgcaggtcagagttcactgcagctttaaactcctgggctcaagcgatcctcccacctcagcctccccagtagctgggaccacaggcacatgccactgtgcccggctaactttccaatttttctgtagagacagggtcttgctgtgttgcccaggctagtcttgaactccttgcctcaagtgattctcctgccttggcctgccaaagtgctgggattacacgcatgagccacctagcctgacctaattttaggataattccattgcccccgccactaaatcttttgtgcccacttcaatcactccccattttcaccctcagccccaggcaactacaaatctcctttttatcactatagcgctaccctttctaaacatttcatatcaatgtaatcatacactgtgtggtctatcatatctggtttctttcactctgcatgatggttttgagagtcatattttttgatatttactcatatcagtttgtttctttttattgtcaaataatattattctattacatggaattgcggttgatctgttcaccagctgctggatacgggattgttgatacttttggccattaggactaatgctgctatgaacattcatgtgaaagtttttatgcaaacctatgttttcatttttcttgggtaaatatttaggagtagaatggctaggttgtaatagtaaatttacgttaaatttaagggatactgacaaactgttggctaaaattgctgtaccattttacattctcaccagcagggtatgaaggttccaattgctccacattctcatcaagacttgttattatctgtctttttaattatagctattctagtgggtgtgaagtggtgtctcattgtggttttaatttgcatctctctaatgagtactattaagcatattttcatgtgcttattagccatttggatatattctttagtgaaatatctattcaaggcttggcccattttaaaaattggtttatttatctttttattgtgttgtaattattttctagatataagtattatttgacttgcaaataacttatcccatctgtggcttgtcttttcattttcttaatagtgtcttctggagtggaaaagtttctaaatttgaaaaagtgcaattcaacatgtttttcgttgatggattatgctttttgtgttgcgtctaagaaattttttcctaatcttagccataaagattttctcttatgttttcttctaagtttttaagttttggctgttacatctgtgtctgcggtccattttgagccacgttttgtgtattgtgtgaggtctgacttcttctctttgcatgtgaatatccagttatcccagttcccagcacgtgctgaagactatctgttccctatcgaattgccttcgcaccttggtcaaaaataaattgaccataaatttaagagtttatttctggaatctcaatttatttcattgatctgtatgtctattcttttgccaatagtgcagtgtcttgattagtatagatttataaaaagttgtgaaatcaggaagtgtaaatccttcagctttgttctttttcaaaaccattttgggtattctgagtcttttgcatttccatgtaaattttaggatcagctcatcaatttctgccaaaaagaacaacacctgctgtgacttgataggaatggcattgactgtaataataaacttgagagaattgtcttcttaacaatattgaatcttacaatccatgaacgtggaatgtctctccacttgtttaaatcatctttaattcttcttaccattatattgtagctttcagtatacaagtcttatctttctttagttaaatttattcctaagtattttactctttttgatgctacagtgaatggaattgtttttctaatttaattttgggatcattcattgctaatatatagaaatacaattgatttttgtatatttatcttggaacctgtaatttgttagttaattctaattgtttatgtaaattccctaagattttctacatacagaattatgctctctgcaaataatgagatgtttacatcgtcatttccagctcgaatgccttttatttctttttcctgcctgattcaactgactagaacctctagtatggtaggaaattgaagtggtgagagtagacattcatgctttattccggatcttaggggaaaaacattccatctttcaccaataagtataatggttgctctaggatttttgcaaatgacttttatgaccttcaggaaattgtcttctattactagtttattagaaaaaaaaatttaaccatgaataggtgttggattttgtcaaatacttgttctacatctattgagatgtttatgttgtttcatcctttattctgtcaaaacggtgtattatattgatacattagcctcacattcttgtgataaatctcacttggtcatggtgtataatcctttttatatgttactgaattaagtttgctcaaattttgttgtggattttttttttttgagggatagttgtagttttcttgtgatgtctttatctggctttgctatcagattaatacaggatttaaaatgaattgggaagtatttttacctcctcctaccctatttctctggaatagtttagggaggattggcattatttctttttaaatgtttattagaatttatcagtgaagatatctgagactagacttttctttgtgagacattactttttttaaagatggagttttgctattgttgcccaggctggcctctaactcctaggctcaagagaacctcctgcctcagcctcctaagtagctgggactacaggttcatgccactacacctggctccagactttaaaattttaaatttctagctcaatgtcttcaccatagttctattcaggttttctatttcttcttgagtcagctctagtaatttatgtctttctagggctttgttcatgtctttctagggctttgttcatttcattcaagttgtctcatttgtttagcataacagtgttcatagtattctcttataatcactagtgatgtcctcattttcattcatgatgttagtagtttgtattgtctctctgttttctttcaaagtctagctaaaggtttgtcaattttgttgatcttttcaaagaaccaacttttagtttcattgtttttgtctgttgttttcctgctttgtattttattatttccttgctttagtttgcttcaggtttagtttgtccttttttcctctcttttgtttgctttatttgttacttcctctcttttgtttgcttcagatctagtttgttcttcttttttcatttcttaaggtggaagattaggctattgatttgagattcttcttttctaatatagacattactgctataaattttcctctaagcactgtgttagctttagtcaactttaattgtctgatttccagatcttcttattaaatttctgtctgatctgctgatctattggttctaccaattttatcacaaccttgggctagctaagatttttgaattattttcagcaacactcttgggcatggaattttccaatcaatcaatgttcatgcctgattccccttggtagaatgtaagcccccagggaactgggcaaggtgatgaaagcagccccaggctacaatgccataacctcacactgttcagtagattttcttgaataaacgcttcttgatatgttgtatgcttttggtcaatttctggagtttttttttttttttttaaggggtagggtctcactctgtcacccagactggagtgcagaggtatgatcatagctcactgcagcctcaagctcctgagctcaggcgatcctccctcagccccccaagtagctggaactacaagcatatatgaccatgtccagctaatttctttattttttgttgagagaggcatctcactatattatctaggctggtcttgaactcctgatatcaagcaatcttcctgccttggcctttcagagtgctgggattaccagtgtgagccaccatgcctggcccaaactttttaaatggtgatggttgttgtttttcctgttccgtcatttcattttgggaaagaagctaccaggcttctcactcagctctttcagaagccctaagtctaggactggggtcttgatatctacacagacaggagatgaggtctctgactcaaccacagtgctgagctggaagtgcaactgctctgtaaatagagccctcagaaggtatcagaacctctggccattggtggagtatgttgggacaatcctagtttacacctgtggcctggtgtaattattatcagtgcccccttactctcagaagtgggtttatttgatgataaatcatatggtcattgtgtagtataaattattgtatacttctgtacttctgtaagaagaaaatgcaaccagaaagaatggatacaagaagtagtagtaaggaaataaattgtaggaacattgttaagtataaataagtatttactttttttggtgagacagaatctttgtcacccaggctggagtgcagtggcatgatcttggctcactgcaacctccatctcccaggttcaagcaattatcgtgcctcagcctcccgagtacctgggattataggtgcacgccaccacacccagctaatttttgtattttttagtagagatggggtttcaccatgttggccaggctggtctcgaactcctgacctcaaatgatctgcctgccttggcctcccaaagtgctgggattacagatgtgagccaccacacccagccaatatttactttaaaaataataaacactaattttgccagtgtgtaaggacagcgacaacgtggaagtttagacaggaaaccgtaattggaatgaaaaggtctataagatctttatgttgttagggaagacaataaggatagtaaaacaaacaaagaaacaaaaaccaactttggactttatttaaaacaaggctagtcactggaattgtgatgtatattttctggcctctgcactgacccctcccagtagagcccactcctagagctgggtggctgtttaatcacttcccgttcacccgattggtgaggggggattcccatccatggttatggggatggccagcactcaacactggacagaagagatcaacagcagtttatttgttattatgcccaagcctgggggaggaggattgcaggggttgcactcggaaacagggtggacaagcgggggctgtgggaggcaggctttgtagtatcaagaaggtgaggtgacccctggttgctgtgggaggatgtcatgggtttgtttgaataattccatgggcgggcagggagtgaaacctgctacttgtgaatcagcaggcactgtgcctagtcccttgataagtaggtcatttggctgggggacttatccaagcgaacagtggggagaggaacttgccgttagtccatttgcagccgcccacacttgctccaggtgtcaaggtagcacataattttaagggtcttaactttaggccttgcactgcagcggcagactgtctcacaggagcctaagggtgggagcactccctctatcctgagtaggggctgacccaagccaagtgagttgaggaggagactccttgcccgagtctcaaaacccccacccccaactttggtgctgggatcccctgctcagtgtctgccctgatcaccctctgccctctcactctgcctgtctgtatattggtctctaccatctgtccatcttcactttcagggacgtgctgtcaaaatccatagccctggggctcatttgtggctcctccttcaatgatgtatatggaggctggccaacccatgtggccctcgccccatggagagcagctgggcatcgttgatgaggtgctgagcccagcatcgggtggctggcactcatactccccaccagccataggcaaccccagcctcctctgacataagcccctccatccctgacacacatgagggggtccatagcctagcagtgctcactgtcatcccaagacctaatgtgattctgtgggtgggtgcaggtgaagttcacctgctgcttctcgctacccacagcagtctgtggagatgccacatcttcctttcaagatctgcgatctcctaatggaggaaggaggattggctcccctggtaggccaccatcacctgggagatgcaatggtgccctcccaggggagccaattatgcaatggcatgcttggtgagtgacattctcatgaacgccactgcagcctgggcagttggccaagcagctgcccacttccctcttttcctacagggtctccatttctcctgggagcatatagctctcaggcaaaacctgagtattctgagttatgtccactggggaggctggcactggggctttttttgtttttgtttttgtttttttgagacagagtcttgctctgttgccctggctggagtgcagtgacaccatctgggctcactgcaacctccaactcccaggttcaagtgcccctgtctacctcctaaatagataggattacaggtacctgccaccacgcccggctaatttttgtgtttttagtagcgacagggtttcaccatgttggccaggctggtctcaaactcctgacttcgaacgggcacccgccttggcctcctagtgttggaattacaggcgttgagttaccacacccagccactgggggttttgaacctgccactcttttgagctgcagaatccctgacagagcctggctgaggagtgcagggctgggggcaagaacagccagaacactgtggcttccttcaatctacctgcaccaggaggggcaggcgttgcttagaacaacagttctcaaccttgactgcttgttaggatcacctgtggaggtgttaaaaaccccagtgtcctctatggaaaacagtatggagatttctcaaacaactaaaagtaaaactaccatttgatcccgcagttccactaccgggctatctacccaaaggaaaagaagtcactctataaaaaagacacctgccttatatttcttgcagcagtactattcacagtagctaagtcttggaatcaacctaaatgtccaccaagagagaattcggtaaagaaaatctggtacatatataccatggaatactatgcagccataaaaaaagaatgaaatcatgtcttttgctgcaatgtggatggaactggaggccattatcctaagtgaaataactcagaaacagtcaaataccacatgttctcagtaagtgggagctaaacgatgggtacccatggacatacagaatggtatgatagacattggagactcaaaggtgggaggataagaggggcacgggggaggaaaaaacctattgggtacaaagcacactatttgggtgatgggtacactaaaagcctggacttcaccactaatatggtttggctgtgtccccatccaaatctcatcttgaattgtaactcccacaattcccacatgtcctgggagggacccagtgggaggtgattgaatcatgggagtgggtctttcctgtgctgttctcgtgatagtgaatgagtctcatgagatctgatggttttgaaaaggggaatttcccacacagtctctctcttctcttgtttgctgccatgtgagacatgcctgtcatcttctgccatgattgtgaggcctccccagccacatggaactgtgagtccaataaacctctttcttttgtaaattgcccagtctttagtatgtctttatcagcagcatgaaaatggacaatacacctctgcagcccaccctgagagatccagccagcccctccctccacaggctctgtcccagcaccatggtgacttgtcacttctccctccattcctgttcctcaagatcactcctccacacaattgctctgttcatatttgccctgttgccctccaagcttctccagacaagaaagaactttggtcctgcccttgaccaagtcactttctcaccctgtgccctggtcctccccttcccgactcgcccagggctgctgtttggtcaaggtcatggacgtgtgtgaatgccagaagctcccaatcccctctctggctgtggcatcacctgccttgtcctgctgtctccagcatgatctcagcccctgctggagctcagacccatgtgggtaacatggggctcttggctgggtggtagcagtttctcctggaaactggggtcagggagagaaatcagtgacacagagggcctgtttctgaacagatagataggatcagaccttgagagacaacttgataggatagtaatttaggaaatggaaggcagaatttccttgggcctgtcagctctgcatcccagcatgcttctggttgccttgacaactcaacaggttaaacttcttttctgggcatcagtgtctgctcaggcaggaggtgacagaacccctggaggtgtgcagatcttcagcaggcagatgactcagagctcaggctgaccttcaccttgctgggctagctggccttgggttgtccctggctgcctgcatgagcttacgatcatgtccaaccagctgcctctgcctcctatccctcctattcatccatccattcatccatctgtttatccagtaagcagtcattgagcacctgctgtgtgcctggccccatgctagcttctccaggcaggtacatgagttcctggccctctctccaggtcaaacaggaataagctgggaggtcaggaagtccatagaggctttacacctggcatatgtgtgggtccatttagaaagatactctcaacacatgcaatgttgcaagcctgtcacccaacgtctaccagacccttcttatagatgcgtcatttgcaaaaacaaaaacagtctgttttctttcacttaacactgcagggtggacctcttaacctctttccatatcgagacggatttttttcacccatttcagtggctttcagtgttcgttgtaaagatgcaccattagtttatttagccagctcctttctggttcatatttaaactgtttgtagttttatggctattcctgaattatttctgtttcctctgatgtcatctttttctgtttgcttcttttgatgtctcttgtggtggaggctgtcctcagatgcttgatgagccctagttacccattcatagttgagagtggagcaataaacatgtgattgattttgttttgtttttgagacagggtctcactcggtcacccagactggagtacagtggcacgatcacgactcaccacagcctccacttcctaggctcaagcaatcctcctaccccagccttttcagtagctgggactacaggtgtgtgccaccatgcctggctaattttgtttcctttttgtagagacaaggtcttactctgttgcccaggctgatctcgaactcctgggctgaagcgatcctcccgcactggcctctcaaggtgctggaattacagatgtgagccaccacacccagccacctgattttgtaatcggaaggagggggaagagcttttcttcagggtattcgggtgaggagtcaaccctcttggttccaagggagaatcattagttggctagggttgctgtagcaaagtattatggactaagtggcttaaacaacagaaatgtgttttttcacagtcctggaggccaggagtctgagatcaaggcattgggcagcgtcggtttcttctgggacctttctcctgggtttgtagatggccatcttctccctgtgtcctcccatggttttccctctgcccctgtctgcatcagaatttcctctttataaggatacccgttctagggatcactagggtacactctaatgactccatttttgataccggtgggctgggggaggtcctcgaatgccagtggggcctcaaccccagccagtgtccaggctcttgacacccttgcaagaaggaattcagaaaatagtgcaagtatagggatttattacaaagtgaaaagtacatgctctggctgggtgaggtggctcatgcttataatcccagcactttgggaggccaaggcaggcagatcacctgaggttgggagttcgagaccagcctgaccaatatggtgagaccctgtctctaataaaaatacaaaaattagccaggcgtggtggtgcgcgcctgtagtcccagcttctcaggaggctgagacaggagaattgcttgaacccaggaggcagaggttgcagtgagccgagatcacaccactgcactccagcctgggcaacagagcgagactccatctcaaaaaagaaaaaaaaagtacacgctcaagaaaggagtgccggcagactcaagagtcgtgtggtggggtgtggggctgctacctttatgcgtttatttaatccaggggtggaatattcatgaaaattcctgggaaaaaagtggagatttcttagaactgtagtgccacacgtttttacaccaaacatgggtggtctcggaactgtcacagcactggtgggtgagtgagttaggatgttaatgagcatacagcgaggtcctaggagaaaccgaggtcatatctagtgccatgttgggcccagttggtcttagccagcttggtccacaccctgtttttcagggtgtcatatgaaactactgcctggaatttttattctcctgtggccaccttgtattattcctgtctcattttaacttaattacctctgcaaagactctatctgcagtcacattcagaggtactgggggttaggacttcaaggtggatttggaggggaatgcagttcattctataccaaacggacttgcagtctccatcctggcagaagacccccagtgtgtacaggaccggaaggcagccagggctttgatcactctgtctgaagcctcccagttagtcctctgaaagcagtgctccctgctcctcctcccagcttggagtccataggttatttgcagtttcctcagcaggtacatcttccatctcccgccaggggtgcagtaggggatagttgcctggtcactggattgtctttttttctttctttttttttttttttaaacagactcttgctctgttgcccaggctggactacagtggcccaatcatagctcactgctgctttgaactcctggactcaagtgatcctcccatcttggcctcccaaagtgctgggattacaggcgtgagcctctgtgcccaactgccactagatttttaagcccacatttcacccctgccatctgcctgtcctggtgcttccaagtcctgcactttgctgcattctgtggggcaaggcagtcttccccgcactcctctgcaggctcagctagcatgtccccttcaccctgtagaatctgctcccaccctccgtccccttcccatcttccaaaatcatgttgcaatctggcatctgctgctgttcctctctagctctcttcattaccatgggcccctctgtttcattccttcgctgtcattatgctgggatctcaggaggaagatgagctcaacgtacacgttcagtccctgtgtttacccagaatcctcctggcttctccccaagaagaggtcagagccgcagcctgcggaggagggtgttgaggcagctcagccagcatgaggctggccctgctggatccagtggggagaggtcacggtcccctagggctgaggagggagagagagagctgtgggcggggcctgtgcatctgtccttggagtcctgaagtcttgaatctctgttgctactgagagggaaggaggcctccaggtcttgctctgcactacaggggctctggacttgttggagaggtgtctcttcactccagggcttccacccgagacctgggctcccgggactgggtgtgcccagcctcctctcccccacccccctgccagtgatgtcataggtgtgacactgcagccaaagaccaggcgaactcaggcgggtgtctaccacctccaaaataaaacgtgttttctaaactgttgctgaagctgctgaaatgttttgtaaaatgtttacacctcccttgatataaggcaaataccttctgtcagccgggggtgggccgggtgggggagccctgggcggggaggcaggatcaagtggctctggtgtcattggtgacacccatgtgtgttcactcctggtggaatttctcctctcaaggtctctctgtccttgctggggagatggggactgggtccttggacacttctgttttaggaagcctaagctcactgaggaattgttctaggggaagtgtctttgaaggaggtgaggcagacacgaagtccaaagctgaggggatggggagttgctgaaaatgagtgttccctggagagtggcaaccatccctggaggtggcaggcgctgagagacagaactcggggggacacctagggagactggactgcagccccagggctgacttcccagccatctgaccagagggaatggaaggcagagatcccccagacaccccaggctgtctgggtccagggagcttcacagggtcctaaagagggggatggggacctggagcaatttactgtgagttacaaaaaaaaaaaaaaatcacatgcagtcggacctgaaccatgcacagtgagcctggctttacacttgagcatgacacgtgatacccactgtctcctccagcagctctcttgaaggccagggaagccagcccgtccgtgacctctgtgacagagctactgctgcagccacacactcagtgtgtcaggcactagatagaaatggaaaggcttcaggccacacacaaggccgtggggctccagcttcccctctgggagagcttcggcactacatgttctctcctaggcagcactgtggtgtcggcagccccgctgtctgtacacacagctcctccgccaggctggagtcaccctctatgcccagaaactcccacggaagaagggcatgggcagctcctcataccatggggagggacaggagggactgtgtgggcctggtggtgacatgcacacatgacatacacccatacatgtaccacacatacacaccccataccccatacacacgccacacatacaccacacatacgcaggccacacacacatacacactcccacacacacatcacatatacacactgcacacacacaccacacatacatacacaccacacatgcatcacacataccccacatacaccacacatgcaccacacaccccgcacacatgtaccacacacatgcaccacacatatataccacacatacccacactgcacacacatgcaccacacatacacactgcacaccacacacaccacatatgcttgccacacacacacggaatgcatgtagcaaacacactctgcccattggcctctgtccaccatccaaagcttctctgccagccctggcatctgcttacagtggaggggcagcccttttcttcctggggctcccacagtaagctgagcagagcacactgctgagagctggaagttctcccctcaagaccatggggacacaggaggcagggagctgggcaggcagtggtatgcagtgtcaggagcctccagggcaggcccccactcccctatcctccttccactatgcagttccttccccttgcaggggtcagcctagcctgggagctggggccagttcaggggcttccatatcagtgagggccacgtccatcattgctgaaagcagagtggccaccagcactggcccgacgtggacgcagggaggagtggtgcccagacctggcccaagccagggtggctacagtttgatctgaccagagttgccctgtctgtcttcagcttgcacctctggccatcccaggttcagggccactcatctcagctctgtcttatctgtggaaataggaaatcaaagtccatgtaatcacaagggaatcgttcattgggaggcaactggacccaaccagaaagctagtgctctcggggaccctctctgggggcccgcagccatggctggaaaccctattgcagggtcctcggagtcagcattggctccagcagcatgtgtttgccttgacaccagaagatggagccctgagccaactcacattcctccagtccccagtccttctccatcttctgtcctctgagatcgggcatcctccaggacagagcccaggtatcttcctatctctgaacacccacagtcaccttcccacactgcatcaccacagggtgtgcagggcctaacactgctatgctaggttcttaacacatgtctgttgtgtggttggatggatggacagatggatgcatggatggtgagtgggaagatggatggatggatgggtggatggatggatagataggtggatggacagattgatggaaagatggatgggtaggcagatgagtgggcatatggatggatggatggatggatgagtaggcagatagatggatgtgtgggtgggtgggtgggtagatggatggagggatgtatgaatggatagagggatggctgggtggaagaatgtatggagggaagggtggatggatagatgaatggaaggacggatagatggatggaaagttggacagatgggtaggtgagtgggcaaatggaagtatgtgtgggcagataggtgatggagggatagatgtttgtatagagggatggatggatggatggatggacagatggatggatgggtgggtgagtgggtagatggatggatggatggatggacagatggatggacagatggatggatgggtgggtgagtgggcagatggatggatggatggctgtttggatggatggatggatagatggaaagatggacagataggtagtgagtgggcatatggatggatgggtagacagactgatggatgagatggatggatggatggatggatggatggatggatggatggatgaagggatggatggatagatgaatggatggatggacagatagatgggaagatggacagctaggtgggtgggtgggcagatggatggatgggtgggtagacagtctggatgagctgaatgaatgggtggatggaaggtgggagggagggagtgatagatgaatggatggatggacagacggatggaaagatggacagatgggtgggtgcatgggcagatggatggatggatgggtggacagactgatggatggacggacggacagacggatgggtaggtacatgtagtaaaagaaggaaatacatgaggggaggcaaagatttgttggtagactgaaccgtagcccctctggggactaaattctctcaggaaacaggttgaaagctcaacatcatctccagaagctattttcttgcagttcgcacacccagcattcctgtggtcttgtcatcaggctgcctctggccctgtctttcttacctctttgttccttggttgcaccccttccccctcttccctggggctgggcattctcaattggtaacacgaacctggaggggatgtgaatggagatgaggtttctggggagaaacagctgtttcccaccccgagcgtaactcccatcacgggccttgggaagctggaacagcctaacagccacccccagttccccacccacatctctcttttctccctgctttgatgttctccagttagtcctggctcagcctctgcagctgctgatatgaatacactaagtggatcaataacatgtcagtcctttgccaggagcaagggtaagagggggtctgcatctatcaagtgctgagtgacagctaatcatttttcacctggcattcacccttccgaagataagcccggctctgctgggaacaagaagacaacgtcagaggctcccctgctccacttcctgcagagcccagggcaccagcctggctcacatttccactccctatgcgtgatcctgtgttaagtgtggggctcagtgggaatgtgtgcacgccctgggttcatgagcaaatgtgtctgtgggtgggattggatctttgtgtgtgcgtgcatgcctggaggctgaatacctgtgagtgtgtgtgtatctgagtatttgtttgagaatgtgcatgactgcgtatgtgcagatgtctgtgtgcacatccatgcagatctcagtatccatgtgagtgtgtgcatgcacaggcacctaggagcatatgtttgaccatttgtgtgtgcacgcgtgtgtctacacaaaggtgtgtgaggggcctgtgttcatcatcaaggtgttgctgtatatgccaacatctgcatctcccttggttacccttgagtcctctctctaggagacaggattcccagcaggctgtccttccctgagccatttcactgccactccctgctcagctggtgcctagaagagaggagtggtggctggaaccctgtgctcacctaccatcccccttcctgctggagaaagcaggtgcctgtagaaggaaggcagtctgagggtgaaggatcctggattggacaggaacatttcaattgcaagggacagcatcaggtagggctgtatctaggctctgccttggtgtggtcagaacttagcttctccattccttgcctctgcttctcctctcgtgggcttcagtcccagatagccttttgccaaggggtggccctggcatctctgggccgccattgtcaccccattgtgttacctgatcatcctcgagccaattcctttggcaggaggatcccatgccccttctggtgtgggtggtgccacctcatccaaaccacaggggctgagagtggggaggagtagcttcccgtggcgaaggggtgctggtgtggttgtgaagggggaggttaggtggacagaaactgagtgtgggtactttcctcctggggtgaggtcttgcgtctcaggcactaagaggctcagcctgcaggcaccgggcctggctcctcggtgcccttggccccacatgggtgctgtgcagtcacttccatgcagccacaggcagctgctctggcctcaagctttagatgagcctagcctcctgaccaggctccaccggttaccccacacccaggcccagccccctcctgacacaccctgccccacaggcagcttccatgccctgggtgtggggcctgggacctccaccatcctctcactgtgcagaaggggaaggtgctgggcgagcccccacccgggggtcaggtgctgcattaggggcctcaccttccccagtgttccctccacttttagatgaggatacccccggcccccatccgggctcagccaaggagccgtaagcagttctgtaaagtgtggctgcggggctggcagccgggctgctcttcccaggctccatgaataattgaagctccattaaaatgtgcgtctgcagcctggaggacacgccctccctcactgagtgtgggcgcaagcctggacagtattgcctggggctgcatctgcctcggaaggccctggaggggcacaaagaccaggtcagacctgccactcctgggccctgcccctgccccctctccttccctgccttcccttttctccccatcctagcatgtggcaggcatggagacctggccctggagctccccagccaggtggcacagagaggcccactccgggtgggctggggaggtccccagctgctccacctctccttgggcactgacagagcctgctccaagggtggactgtggcccagagtggggggccacacctcggcacaccccagccagggaccaggccgcagctgctcaccagcagatccctggaggatcgacccagcagatgctgggggttggggagggagtgagggcacagagctcccgggagccatcggcagcgcacagctgtcatcaggagaccagcactgctgtgtgtgcaagtgcaagcatatgtatcggggggcgctgttatgagggacatgagtgtgcgtgcacagagtgtgagggtgtctccagagctgcgtggctgcatgtgattgtggggacacaaccgagtctctacgtctgtggctctatgtctgcgcgtcacaaacccttgatcaggctaagaggtccccgtggggaagggcatttctccttggctcctgactgatgcccctccccacacactcaccccccaggggcatcctgtacctgctgttgtgggcccctcctcgactcattctgagagctaagcctcgagtcctaatccaaatctgaaattcctggtaatgaaatctgtgaaaggtgaaaattaaaaacccatggccacaatctcctggtccctgcagtggcccagggtccctgctgagccctgcgtggggcctcgaggcgccagtaccagccctttccccactgccctgccctgagctcagtgagccttcactccctcattagcaagaagggtgcttctcctgccttcaccttcctttgccccaaatgcgacgcaagcgaaagatactctttctcccttggctctcccacccactctggcctccctggtcctcaccactgggactctgggggtctcggcacagaggtgtgatgaaagaagggttaggggctgccagggtgagccaagagaacagagctggaggcttcagcctcggccagccccttatctctagcctcatcttctatattctctcatctggtcgtggtgggtgctttgggaaggatcagggcagagtgacctgggccggagcctggccacagggtctaggtggctggtattttgggctgagctggacttgcccactggagacactgggaatggggccgctcagggctcttgcctggaagtggtccgattccccttggcccagagagaagctttcagggtggggcatgaaggtcattgcccgctgcagcaggggcttcttgcattctccctcttcctcctgtaagaaccggggtctgagttgacccagttctatcccaaggccttcagcaaccgggcagaaggccctcaggccactgacctcttgagatgactgtgctttgtggccaggagtggaaggtgtggtggtagatggggcaggggacagggccagccagtcacataccaggtcctaaaggccttgccatcctgggacctggtattgatgtctttaaaggtgagtatcagctggtcacattggctcatgcctgtaatcccagcactgtgggaagctgaggtgggaggatcactttagctcaggagttcgagaccagcctgggcaatatagcgagaccccgtttctacccataatacaaaaattagcatggtggcgcatgcctgtagtcccagctactcaggggcttgagctcaggagatagaggctgctggaagtcctggttgcaccactgtcctccagcctgggtgacagagcaagaccctgtctcaataataataataataataaaagtgtgagcatcagctgggaggtggggagtgaagggtgtgggcactagaactccctctgggtggctcacaggatggggctggatcggtgtcccaggagcagggaaagccacccaaatgtcccacctctcgacagcagtgctgaactccagacatggcgaggacaggtttagatttgattcttcctcctgaccgccataaagaagggggctccctggcaaggggctaggagacgtgggccaggggctgcaaagaaaggggctgaggggacagtgcatgccggcaacccagccctcagggccatcccgagtgctcagcctcagtgcagctgctcctgctcccccacctcgacccgcacctctgctggcagtgctcccctcccagctcctgcaccttcccctcctctgcttgtatctcagtcccacccacttttccaagcccagcccttccgtgccactttcgctgatgcctgatcctgagccctctcctccccttcccaggccctttctgtgccaaagatgcacttcatccacagtcgcccgggagccacttctggccacgcgtcctgctccccaggtgcgtcctatggtggggatcctctcccaccacctccctttcttcaaatgaggctccctggctgatcctgtgttcctgccaggggaaaaacttggtaccttgggcatccccttctggaaatcttccatatgtcaggcttaggacggacaggcagcgcaggaccacaacttgtgccgacccaggaggctgaaccagcctcccgtggtggctgcagcactgcccaaggagtcgccgtatgtgtgaacccgtgtctgtgtgtgtagagtgtgtgctcccggcccctgaaagcctgtggccacttgcattcatgcacatgagtgtccatgcacatgtgtgtgccacagagtcccagagtgggctgtagtggagccgagagtctgccgtggtcaggccgtgcttggggctggggcctcagcaccggatggggctgtgcatcttgtcgcgcctggctttattaatccattttgtgaatagacttgggagttcatgttgggaatctggccatttgctcccatttcctccaggccccccggaaggaggaacacatgttaaatatttgcggttttgctgcgttaggttttaaagttcagcagtaattaccgtgaccaggtgccaagtggatctgctccctggagaaggctcctgccgtagcgggctggtggctgcattccaggccagcctctgtgtggcgtttgcacaagcctgtgtgccttgctttccggcgcctctctttttcggcctccactgactgctgggcccttcactcggctgggctgtgccttctgtgggtgggtgctctcctctggcccagccccggcccacactcccaaagagcaggctgcgggcagctgaggcaccaatgtgggactttggtaagcagagcctgggggctccagcaagtgccttcgctcccacggcaggttcatggccacacctgtggctgtccacacacatgccatcagagcagacagaactgtatttccagagcacatgttagtttttaaatccctcaccccagccagccccatttcagactactcagttactctttcatgtaaatttcatccaatcatgttttcttgcacaaattcagcatcattcacacatccccgttgagttcacagttctctctaggctctggcctgggtgagtggtgacatctatgtccttgatgtggatatatgcagatgctgcttttggggcggcttctgtagccagggcggtgccctctgcttcctgggtagcagctgtgtctctgctgggcttgacctaggactacatgtcacacccctcaacagtgatgtctttcagggttgctgccagatcaaaggaagagttgggggaacacagtgccagcaatgccaggcaaaggaaaaggggcacattcagccaagcctcaagtaaccatgccctgcaggcctcacacagtcccaagagagaaccccgcatggcctctgatatttgggtgtggttcgatgagcatccctgagacagccacaggcacccagacatgcacctgccctcaacagactcccagcccactgggaagagagccacacatgctcagagtacaggtgcttaggagggggaggtgcaggggagcccaggccagggaagggagagagggaagcagaccccacttcttcgagctccctgggaggcctgtgagcccagggcaggaggagctggggtcatctggggagaagatgcaacacaaggcaagcttgcccagtgagggagactcagtcatgaggacagaggtgagctccatagggtgctgctgcgttagtctgacttctggccctgccctctgtggaccacatctgagtcctgcgggatgggcttggaataagcaagaagagcatctagggcatgttgagaaagactctggcacagggagctgctctgctggcttctagcaggcgtgggcagagaggagatgggcactcccccactgtgcaacaggataccctgcaatttagtaatcccaagacctccaggcctcagtttccggtagaacttagagggaaatccaaaggaagcccacagggaaacagactgtcattaaagtgcagctggggctgcagtctcatctgacggctcaacaactgagggaggatctgtttccaagctcagccaagtggctgctggcaggattgagtccgtctcaggctgttggccagagaactccctcagttccttgccatgtgggcctctccgtagcacagttcatggcataggagctggcttctttcagcgtgagcaagccagagagggaaatgagacagaagtcacagcgcgtgtgtaacttaacctcagaagtgacagcccgtcattgtagctgtggtctatgtgttagacgctagcctccaagtccagcccacctgggaagggattgcaagagcatgttgccaggtggtgaggattgctggcaccatcttggaggctgcctgccgcaggtgaggtatggttgaggtgctttcatagggaaattgtaaccatcataggtccactggccaaagcatacagcaagtcaatacacccaaacctggttgcaacagagaaagagatttaattgtagggtcactgaacaaggaaatgggaaaaaacctcaaatccagctccccaaggagtttgggcctggggtttttaagggttttggagtgggctgaaggatagagattgtcgactggtggaagagtgcagggtgaagtgccaggggcagtgagaggaagaacctgtgttctcaggctgatccccatcttctgtggggtcttcaaactagttttgctggaattcacagtctgaaagaaaaacatcgtatatgatccttaaacaaaagcctatgattttaaggttggagatcctgtctataggagcaatggggatgccaatcaattctcaaacagtcttaggaccctcatgtcagaaatcctacctataggagcactgggggtgtgcatcgtcaagacttagtgccatgtgactttctgctacaaggaagtgggccaaagtgcagcctgattgatgcttaattataactatattcccgtcgagaacccggcgtgcaattcttgccaattccgtggggacagtttcaaaatgacatgctctgccttcccctgtaaaaggatcactggatgctgtgaagaaacagtcagaggaagcaaggttgaagcagggagacctcttgggagaaacacttcactaaaactagtttctctctctgtacaatagatgtaaggttaatcatagaagctgtctcaggcgacattgtaagaattaaatgagataatacagggaccacgctaagctcattctttggtcttttcccctaaggaaagaagtggcacatgccccactgccttttcgagagtctggcttatgctgctgcctactcgagttcattggatgtgttactggaaaggggtcccaatccagaccccaagagagggttattggatctcacgcaagaaagaattcagggcgaattcatcaagtgaaagaaagtgtattagtcagggttttctaaagggacagaactaataagatagatgtatgtatgagggggagtttattaagaagtattgactcccacaatcacaaagtgaaattccacaataggccgtctgcaagctgaggagcaaggaagccagtctgagtcccaaaacttcaaaagtagggaatccaacagcacagccttcagtctatggctgaaggccccagagcccctggcaaacaactggtgtgagtccaggagtccaaaacctgaagaactgggagtccgatgttcgagggcaggaagcatccagcacagagaaagatggaagctggaagactcagccagtcaagttctgcctgctttattctagccgtgcttgcaactgattagatggtgcccacccagattgagggtgtgtctgcctctcccagtccactgactcaaatgttaaagtcctttggcaacaccctcacagacacacccaggaacaatgctttgcatccttcaatccaatcaagttgacactcaatagtaatcatcacagcaagtttattaagaaagtaaaggaatagagaatgactactccataggcggagcagcagcttgggctgctggactaaggatacttattgttactttgtgattatatgctaaacaaggggtggattaattatgagttttccgagaaaggggtgggcaattcccagaacttagggtttctcccctttttagaccataaagggtaaattctaggtgttgccatggcatctgtaaactgtcacggcactggtgggagtgtttcttagcatgctaatgcattataattagcgtataataagcagtgaggacaaccgggggtcactttcatcaccatcttggatttggtgaggtttggccagcttctttaccacagcctgctttatcagcaaggtctttgtgacctgtatcttgttccaacctcctatgtcattctgtgacttagaatgcctaacctcctgggaatgcagcccagtaggtctcagccttattttacccagtatctatacaagatggagtcactctagttcaaacgcctttgacagatgtgttttcgtgtatgcaaacaatgattgagatgaggtttgggttcttcacaaggagcccagagcctgtgcccaaggctgtggccagatcctctggtttacacagagaagatctcaggcagagaaaaggtgtaaagatgcactgttctccttgctggctgccggtgacctcttttccactccaagaagctcatggactcagggaaacaagacagcctgtctcaatggctcagtccacacggacagagattgaggtgcaaggggagggagtcccttaatccacacactgctcacactgggacagctgcgtctccacttcaacccagccagctctgccctgcatgagcttggccatgtgagttcagctgcataccgactgtgctctgttgcaatgctgcctctttcttttgggctctgaaaagccgccccctgaggctcatgattgcccttactttaaagatgaggtcaagcacatttggccgtcactcaggagatcctcttgtctggtccttctaccaagaatcgttgttctgcaccagctgttgcaaggctcacgcctaataaataagcccgcgttctgttttgcccccagctgggctgtactacatactgtcctgacactgaccacctggagttagcaccagacgccacaagtaaaggacagagccctccacaagactgactttacttcagacactggccgcaagtggggtccccaggccacctgcaccgctggccaactggctacagagtcaggtgttcctgtgaatctgtagccagctggccagcagtgtaggtgctggggcccctccagtttgaaaatttgttttaaagatgcagaacacaggcaagtactatacttaaaattgcatttttattagaaaggatacccatagatagaacagggtctgggagggtcccaaacacaattttctcaggctctgggctcctggtcaagagcccaaacctcatctcaatcattatttgttcacatgaagacacatccaatgaaccgaagtgggcagcagggcaacgccagaccctcggaaaggcagtggggcatgtgcatcttagaggaagagacaaagcatgagcttagcttgattcctgtatcatctcatttaattctcacaaggttccctaaggtaggttccatggtacctccttcatggagggcatatcaccctcccagcagatcagtgtgttcaactgggagctcctctgagcctcagtgtctagagtttttattaggattgcattatgaattggggtttgattatgagtaatcaatgattgatgattgattggctgcatgacagaactcaatctccaatcaccctcccctcctctcttcaagtggttggtctttctggtgaccagctcctatactgaagctctctaggagcccaccaggacccatctcattggcataacaagacatgcctatcactgtggaaattccaagggtttttgaagcactgtgtctggaaccaagagacaaagaccagatatattctttttttttttttttttttgagatggagtcttgctctgttgcccaggctggagtgcaatgacatgatcttggctcactgaaacctccacctcctgggttcaagcaattctcctgcctcagcctcccaagtagctaagattacaggcccccacaacaatgcccagctaattttttgtacttttagtagagatggggtttcatcatgttggccaagctggtcttgaagtcctgaactcaggtaatctacccgccttggcctcccaaagtgctgggattacaggcgtgagccacagtgcctggcccagatatattcttgataccacagcccattaccaagtgaatacagccttgtaaagtgcaactttcaaacttactttgggatccattttattatctctttactagttgttcttgcatctgtcagttccattctgatttatgccctcatttcttgtatggcatcctaaaccccctctctgcataaattggggtgtaacagatagattattgcaggcccttccttcagctccgaaagaacatgcaacataagagctggaacttcctacataggagccactgctagcctctaggagccacagccagcctctaggagcactttctcaacggcccacacaccatcataactgcagcctgctgcagagagctctacaaacttccgtcgttgatctgtgatctatgaggcaagcctcctctccctgtgagcagacagcggtgtcagaggtgtgtaaaccagagcaactccatcttgactagggcctgggaaaaaagaggctgagacctactgggctgcattcccagatggttaaggcattctaagtcacaggataagatagaaggttggcacaagatacaggtaataaagaccttgctgataaaacaggttgcagtaaggaagccggctaaaacccaccaaaaccaatggccatgggagtgacctctggtggtcctcactgctacactcccaccagcgccatgacagtttacaaatgccatggcaacgtcaagaagttaccctatatggtctataaaggagaggcatgaataatccacctcttgtttagcatatcatcaagaaataaccataaaaatgggcaatgaagaatggaatagccattcttcattcctttacttcttaataaacttgctttcactttactctatgaactcaccctgaattatttcttgtgcaagatccaagaaccctctctgggggtctggatcgagaccccttccctataacagcaatggggacccacactgtgtgacacagtggtgctgtcccccaggtgggatgaatatgaaggaatggggtggcagctcactgggccagcccccagcccccaggagaacgccctgccatcgttgtcccaactgcaggagctcagggagaggagaggaaggagggagagcactttctcagtgcccaggccaggaggggcatcacgagtggggtctgttgggagtgaggacccaccttcctgatcccagagctgcccactcccactgggcccagcataccaccctgggagcactgacttcccccagggaccttcctgacatggggacagggaaaggcactacagggtgaggtgggggtgaggttctgttgacaaccaagtctcctgcacagcttggtccctgaaacatcccctgaccccagcatcaagctgaacagagggtaaacgggatctctgtgtgagggtcctccatgccacggcttgggcaaggccagaagctgcatcaaatgtcagatagggaagtcccagcccaggcaagaaggaggctttaaaaaaggcttgtgtttgttggcaagcagcagtgccaggcctggcttttgatcaaaacatcctagctgttggcagagacaaaggcaatccctggaaacagcctggctggggagagatggaagagagggcagggttgggtaggggggtcagctctggcccctccccagctggctcacagcttcctaccctcagggcccgaccttgctcctccatggggagggagggggtacttggagaaaaggctttaaatgcctcacaggcagagttagcaatcaggtttcaggaggaaactcacagattgatggggaagccgtcaaatgcacccctggcagcaggagagtgtgaatgggaccgggaacagtgtctgcctccagccaggctgcccccttctcccgactgcccactgcaagggcagtcagagggtcttaggttctgacacacagacacacgcagacacacacacactcttcactctccactgcagccatacaaaatcacattcttggccagtcatggtggctcacacctgtaatcccagcactttgggagcccaaggtgggcagattacttgaggtcagaagttcaagaccagcctgaccaacatggtgaaaccctgtgtccactgaaaatacaaaaattagccgggcgtgctggtgcacacctgtaatcccagctacttgagacgctgaggcaggagaatcatttgaacccggagggtagaggttgcagtgagccgagatcgcgccactgcctgggggacagagcgagactccgtctcaaagaaaaacagaaacaaaaacaaaccaaaatcacattccccaccttttaccagaaggcttgctcacacctgtaaatggagtgtgcctcctctccacctgtttctaattaaagatgtgtattttctaaggcaccacccgccacctggcaatgtccttacaaaagagactgctccctgctgcagggccagggatggcttcagcccaacgatgctaagaatccatggtgacagagacagacatggggccgggatcccaggcccagcctgcgcttggaagcacctcttgcctcactatggtgtcatagaccctcagcctgagaacagtctcaggatgctgttgaactgagacttggactgagaaaggaggccaggggatagactggagggtgcttccgagttgaggtgttgtcctgaaggtcaacagtggaggactagccaggaactgatcacgccagattctataccagcctggagcccacctgggctctcccggatgctgctaatcaggatggagggtaggggtgcttgctgcaggtatttagaaggctccccagctaaccgctcccaggcctgcctccctgtggatgatttgcaccaggctgttttgtcagcctagcactgccttccccggggaatagtgaactcacttttgcagagaagggatctctcagagggcccttccgaggcactctctggtgtctgcccaagctcagacaagatgcatagcctggtgcctgccaggccaacgggggtgactacttatccagcagataagtgtgtgtgagcagctctggggacatggggcaataaggggaggtctcatgtgtcaggggcagccaggaaatgttctgttaagatgtcctttctgttcctgagattttctagcaccagcagacaccgtggccaccacccctctctccctaccccatactgcagacgttgggagtctgcggccatgtaggatgcagcccacagctttgtccccaacattcatgaaggaatgcatggtgtgtcactgccattctgagataggagttcagcaggactagtttcccaggaccctgatgaaaaaacaggatgcagtagagaagctggccaaaacccgccaaaaccaaaggtggtgatggaagcaacctccggttacccttactgctcctaagatgctaattataatacattagcatgctaaaagacatacccaccagcaccatgacagtttacagatgccatggcaactcctggaagttatcctatatggtttaaaaaggggagggaccctcagttccaggaactcccagctcctttccagaaaaactcattaataatctacccgttatttagcatgtagtcaaaaataaccataaaaataatcaaccagcagccctaagggcttctctgcgtatggaatagccactttttattcctttactgtcttaataaacttgttttcactttgctctgtcagctcactcttgaattctttcctgcacaaagccaagaacccacttggccttctgggctgagccccagttttggggtttgccctgtgacaattccatccccaggttcagggccactgagacacgcattcggaactgtccctagcactgggtattggctgccttggtgaccagggctaagcgttcactgtggccataattagagctgggacaaatggctattaggtcctaattgtcagcttttccaaatctggaaaaaagccacgggacagaattcccagaagggaattgtccccacggactactggggacccttctcaaggctgtgggcatctgtttgcggaactgtgtcatggaagccacgtgccatactaagtttgaagtctgagccaggctctcctctaaagcatggctgtcctcctaggtcctcctaggatgggcatcctggccaccccttcctttgagcttcccccagccttctccaatgtgttttctgcccagctaatgccccttgcctaaccctggacttctcactctcctccaagcccattccctctgcatttgatagccacgtacctggcccccaggctgtgactcactgttatctccaagcactagagaattttctcctgtcatcttcagcaacaagtggttgcagttttcattgcagttttcattataataagaccaaaagaaaaaaaaaactgtagctgagaaaatagatgtgtgctttccaccctacactgagaacatcttgacatttaaatccaattacccttttcccattcttgatgaggatatgacatgctgctagaacattctgctagataaatatatcatattctctgactgctcaaaacctcccaggggtggatttgggggttctgtgacccccgttcactatcggcctctgtgagaggacagggtcgtggactggctgagctaaaaggccctgaaaatgtttgcctggaaaaattttgcagcatttgacctctgcctttcactgagtcattaattgggagaatggaacaattgcagaaacagggggacttttgtcctttgtatcagatctgtacacattcaaaccccccatccctgggctttcagcaaaacaccacaaaccagtaggccctgggcagagaggtattaattaagcacattcccatattacttcaaaatgtctatcctcccagaagcaaagagtcattgactctaaatgaagcagaaagccagaaaggagcccttacagctattattctgctgtaaatattagttctcttttgacatctggagagagagagtgcaagttttttctttttttcttcttttgagatggagtcttgctctgtcacccaggctggagtgcagtggtacgacctcggctcactgcaacctccgcctccagggttcaagcaattctcctgcctcagcctcctgagtagctgggattacaggcacacaccagcatgcccggctaatttttgtacttttagtagagatgaggtttcaccatgttggccaggctggtcttgaacttctgaccgtgggtgatccacccctctcggcctcccaaagtgctgggattacaggcatgagccaccgtgcccggccggagtccaagatttttagcaagtgtgcatactgttctgtggctagagagggagatggtgggtggggaggatattgccaggattaaagccgggaggaccctgcatcctttgccttccagtagggttccccagtatgggccgcatccacagggatcaggcaaaactcccccgccctccttctgaaacccacttaccatgtaaagttacacggttttaacttgactctgcatccatttccacctgcagagaaagaggaaaatgaaagttctgggagatttagaatctcattgtaactgttaatttcagccaggatggaatccctttcctatccttgtcccagccatgactattatcatcctccgttgacctctctcccccctcctccacaagatgaagtgttaacaagcagaggaaaattagctccactcccccagcacaacatcccctgccctgcagaagtcgtggaagccataagccatccctccctgccttcctcccccttcatcagggctgagtggccagttgtcttcctcccctgaggatttcatcatcctcagatatcccagagagtgtttgcagttgttcatcctaaattacactgttgttttagcctgttgtgtgctcagagctgattaataaacagaaattaagtcacttatttactttttgcttcaaatcacagtgtgcgactcgagtggttgatatctcactgatatttgtgaatgcgtggatgagtgactggatctgcttgtgtgttgaatggaattcaaggttccttccatcagtcccaaaacatcattcctaagagctcacatgtgcctgtctgtttttttacaaaaacaccttttgtctcttctaatagtccctgaatgcttaggtaagagtggagaatgagagctctcttctctgacatccaggctctgggcatctctcaaaaagagatggtcaaagaatctgatgaggtctgctgaaaaggaagggtgccatagagaaccagaccagcccccatcctggtgagcggtgcctcctcacacaaaaagctaatggtttgggttggtgtggtcagaggagagcagctctcagagacagaggtgaggatggaggccctttcattttcctggtgagtctttccatactactttttaaaagaaagtcggtactttaaaatattttgtaagtcaatttgtccaggatgcctgcaagttttcctggaatttgatgcaaatacgaggctatgctaaagccattcagcaagctgtaggagccccaagtggagaaactcaaactagttcacaggagcaaacatcatgcagctccctccaaggctacatcactcgtgggttgtggtgtttctttgtggaagtccccaagctcttagggtgagagggctcttcagtgacgcccagggacctttctcaaggctgtgggcatcggtttgcagaaccgtgtcatggaaaccacatgccatactaagtttgaagtctgagcaactgctgggctgagaagatcttcaggtttccctgtggccgtgcagcctgtgtggcatctgccatgcaaggagggatctgggacaaagacagcttgctggactgggtcacttcagggaattcatggcaatagctttcccagggaaaggagaatcaccctgaaacagacccagactggcaatgtaagtcggactgtcataccactgtgttgaaactgcagcacgaagtttctctgcctcttctttctctgtttcagctctctgtttcaggaggttcagcaagccctaaaggccattacctggccacctacctatcttccccactagagagtaaacctctctagagattagttatttatctttccatcagcccccagaactggcatcatatgggacagtgcacacacaagtcttggtttctgaacttatcggcatcttgtgggggctgtccatggtgttgaggccccactgtagtcatttcagttaatcatataaatggccagaacctcacgggttatccatggtgttgacagatttcacaccttacattccccgggtcctcctatcccagagaacagaacctggagctaaacccttagagcggggtatcattgggagctgtccgtggttctgaaaacagcactccctctccttccagttgcctgagctgctgcggcagggtcagaactgtttgtggtgtcagcctcgttttgatcagctaattgccaattttctgcttcttggtccagcttagaccccagccagaatctggcctgctgctgctgtcaatcatgctctgaggtacctacatggtcctgcttgtattgactctgcctgtaacgtcagtcctgccaggccctgaccaaggactggcctctgactgcaaggctgcgttttattccagcctgttgtatgtcaggttccctggaaagcagactgaggcagcgatttgcactcaggaagcttgttgggtttatattatgacaaagaagagttaaaataactttggagaaaaatataagtgtctgctgtccactgcaagtcaacatgaactgtttctgatagtcctttttgacagggatggaaaacaacctatttttcaaaccagtggtcacacaccacatacctgaggccacaaacatcttccctagcaaatataccatcatcccaccaacatggtggttgcaactggggctatatcttgatagagtttatgggattctggtgggacttgcgtgtcttttgtaggactggactggtgaaattccatggtgatttgatggtgatgactactcctgcatccttgaggtcttttatcaagcagagtcctgtggatttttttttttttaaattgtgctaatctctatgagacccccaggaagtaatattgcctttgatttaatgtctagattcatgggagagggtcactgtcaaaggctggcattccctatggtgacggtccttatcccacagatcaaggacatgggggttttgccagctgtcacatctatctattcggattatacatctgggaactggggagaaatgctcgccagatgggagtctgtgaacccaacatgagccaggcttgggtcatttattacctggtaccctatgtgccctcactgtatcagggtgcaatggcaacacttccagttctcaggggctaagaccccagatgtaaatgtcaaaaaaaaatctagaaatgtctgagtgttctccttccccaagtgtacacctgtttaaccaaatggctgtgggtcctgttggggaaagactgagaaaacattcccatgtgtatttgccatgatgccatggggttcttcttggggatgtggtctctcctttggtcactgagttctggatctgaaaactgggtgtattagtttgcattgtgtttctataaaggaatacctgagactgggtaatttaaaagaaacgaggcttatttggctcatcattctgcaggctgtacaagcgtggcaccaacatctgctcagcctcaggaagcttttactcatggcagaaggcgaaggggtagcaggcatgtcacatagcgagagagggaacaagagacatgccagactcttttaaacaaccagttttcatgtgagttgacagagcaagaactcgctcattaccatggggagggcaacaagccattcatgatggctgcacccccatgactgaaacaccccaccagactccacctctacattggggatttcatttcaacatgagatttggaggagacaaaacatccaaaccataacagtgggcaaagaactgtgccattttcttgggacagctgatcacccctccttgatttgtttttgttgtatatatcggcttgtcgaccacctgactttcttgttttttgggatgccatgttttggtgaccacctccatagctctctgcagatcagcccctcttggctgctacaccaacattgctactcagtaggacaagtgtgcacactttggttatgatggctaagtaccaccgtgtggtttctgttattttacaatcctattgtcccccatcagtctcggggtgtccaggtctgtagtggcactgcctacattcagccctgtcctacagaggagaggcactgctgggcttctcactcatgctggtgcttcctgaactctctgggctgcagaggcattctgccctctgcaatataggctggtggccctctgttcattgaagacactacagagatctctgtcctacaacacaacatatgccccctgatcctccttcccctctcaccagtgtgttctatattgctttagaaaggggtgggggtatcttctaggcagtagtggattttccagctttccctagcatgtccactgtagcataaccacctttgggagccttttgatctcttcctgcactatctaccacagcaattctttttttttttttttttttttttgagacggagtctcgctgttacccaggttggagtgcagtggcgcgatctcggctcactgcaggctccgccccccgggggttcatgccattctcctgcctcagcctcccgagtagctgggactacaggcgcccaccacctcgcccggctaattttttctatttttagtagagacgggatttcaccgtgttagccaggatggtctcgatctcctgacctcgtgatctgcccacctcggcctcccaaagtgctgggattacaggcgtgagccactgcgcccggcctaccacagcaattctatcatccctgcttcattgagtgtgggcattgctttctgcacgtatctgagagccatctagcagcatgtctgcatcgtctcctggggtcgttgctgcactgtcagatcctctaacccaagagaatcctcccttatcaattactgctctatccaactttgtgttctgcttttttctttttttctttttttttttttgagatggagtctcactctgtcgaccaggctggagtgcagtggtgcagtctcggttcactgcaacctctgcctcccaagctcaagtgactctcctgcctcagcctcccaagtagctgggattacaggcacctgccaccacgcctggctgatttttgtattttagtagagacagggtttcaccatgttgaccaggctggtctcgaactcctgacctccggtgatccacctgccttggcctcccaaagtgctgggattacaggcatgagcccccgtgcccagcctctctgatctcttgtctaccccgcacaccctgccccagcgtcaaggtctatgtgtactctcctggttcctgccaatacctgatttctggatccttcttttcttttggggtatagttcctttcttcccttagcaaatctagcacttccccagtggggacatgctgtgatttaaccgtagttattggtctagtggagaaaaggtgggggcagattctgaggaaggcatgtgttatgttgcaggacagagacctctgcggtgtcttcaattaatggaagaccaccagcctgtattgcagagggtggcgtgcttctgcagcccagaagattagaggaaatctgggaattcaagactttcacaggcatcgacctacagtccccaacgcatttctcagggtcctgttccttctcagccaggtgcctgccattgccaagagtcacccttcagaagctggatactcttcctttctccccttcatttttttttctttaagagacagttttgttctgtcagccaggttgtagtgcagtgctgcaatcatagctcactgcagcctcgaatgaactcttcggctcaagcaatccttccacctcagcctcctgggtagctgcaaccacaggtgtgcaccacaacccccacctaattaattaattgatttattatttatttatttattttgagacggagtcttgctctgtcgcccaggctagagtacagtggcatgatctcagcccactgcaacctccacctcccgggttcaagcaattctcctgcctcagcctcccgagtagctgggattacaggtgcctgccaccacactcggctaatttttgtatttttagtagatatggggtttcaccgtgttggccagggtggtctcgaactcctgaccttgtgatccacccacctcagcctcccaaagtgctgggattacaggcatgagccaccatgcccagcctaatttatttttattttgtgtagagatgggctctggctatgttgcccaggctgatcttgagctccagccttaaagaccttcctgccctggactcccaaagtgttgggattacaggtgtgagccacagtgcctggcctctgctactcttaagtcttgagacctgtcctcttgctggaggtaagagtctctatataggctgccacagagttaattgccagccaatgccattgttcccaaattactatttgccccatatttcttagcctccagatacatttttttacatgccagggcattttcttccactggtacgccatcctagtttatcatcaataaacattttaacggaggcattactgcctctggccttgtgccacagctgcctgtgctccacctaccaccaatgctggggacctccttgctggctggttggcaggtgattcaaccctaacatttcatcttagcatctgctctctctgccccactggcactgactgtcgggttcctgggaaagagactctgaagaagtgcaggaggtgaattgcacggggctgggagggaggtgccctctgatcaacacctgtaagggaacgaaggaagcaggagtgagggcaccgggtggggatttagtctgccagtcccacagggagctctggagctgggatattcccacagaattgacctgaattgatgcaagggggctgtgcctttataccacacatcaactagtgtctggatgcaggcagccccttgggtgaggggactttgtccagctgagaccactctctggagagagacccagccaagctgcagggctgtgatttcacaatctcacctgaccccagcctccctgcacccttcacctctggctcccagcccctgctgtcctggctcctccattccacatgggacaaggagtgactaaggtttacttgactggggcggagacagtttttccaaattcctttgcttattcaaggatcattgaaaattaattgtagctggtgttattgaactcacagcagtctttagttttataaaagccttttccttccaagtgttgccatttggtgttactgagatacaagcaagatgtctgcaaaactaaaatagcatttttttaaaaaacatggcactttagagttctaaaatatgttcacatcgttttttatcaatttgattgaggtgtaatttataaacaagaaaacacatgcattgtttatcaaatgtattccatcaccccaattggagacgtgaaacatttcccccaccccagaacattccctcgtgttcctgctcactcactccccgcaccgcccccggcaaccactgatcttattccatctctagagattcattttgcctgttctagaattttacataagtgagatcctacagtgtgtgttcctttatgcctggctgattttgcacagcaaaatgtttgtgaaattcatccatgatcgtcatgtatatgagtagttggtgtttttcttacaggcaagcagtattccgtagaatggatgtaccatgttcatttatcagtttgcctgttgatgggcatgttctttgagtttcctgacacagcatacctggacacaggccatgttgtctttagtgacattcaggcaggaggagtgacctagtcacagccatgcggccaggagttagtgggaggtgagttctgcgaagcagggggcctgacttcactccattccagcgtcacctaacaaaagaccctagaaaacaaggatctggccagataactggtacattttgttctttttttttttcaaggcatttatttttccataagatgctctggtcattttctttggatgctacttgagttagcatcctgccaagcaatatgaattctcctttttaaatcagggcgatggtaattgaggggcagacctgcagagcaatcggtttgggcacatgcatgtcaaacggactatatatcatgacatcagacattttgagaaaattgctgttcctccctgaatgtcaagtcataaataatttcaggttggggagagctctggtaagcatatgtttgactccagggaatggcctgtaaatatggtgggccagagaataaagaacgagggggcagatttgtggggtcacttctggtctggaccttgctataacttgttgtagagaagccataggtgccccactcagacacacttcagcgggcaggtgcgcccttcccctgctgcagttagtggggacagctaattgctcacagctgcacccgtccttagagatctgacctcagctgataggatactcctcttctggaaggcgacaccttccccctggagttggcctgcaacccattcacatgctggtaaaccccttctccagggaggaagagaatagagccctgatttgtagcacttgccaatatctatggtgtaaatactcccactgcatccagctctaagctaccatgtaaaaataaacaatacgttgcttaggggatatagacatatgccacacacacatacacacacacacacatacacactactaagaagagaaaggaatgataaacacagaattctgtgaagtgattaccccggcaggagcaggagagggctgtccaagaggggcaaagagggagcgtcaatgatattgatagaattctgtttctgaaactgggtggtgaatacctggctgtttgttttcttcgtctttatagtgttatatattttcttttgcatgaatgaaatgtttcatgacaaaaaacaagtctaaggaaggcttttaagctttgagatttttttttaactgacacacaaggggggttcctagctctttgtggaggccgaggaggtggctcagcgggtctcctggctcccctgcacttgcccgctgggtatgatgacaaagtccacacttctaatgagttctggtggagaaggaacatggcctggggaaggagattttcctttccctcaggacaggcaggaagaggaggtggatgaggggctgtccacagagctgtcccgtccagtgctccctcctgccaaggacccaggggaatgccgcctgccactcacccaaagccaggctgttcgcactgtctgatccacggcatctagggccttaatcaatagtcatgtagctatgccccaggcactcgccaggcccaggcactcagcttccactggatggcggtgagctcagggaccctccacatcccccattatcatctccactctccaagggcagaagtgcaggacctaatgggtccgaacctgaccaagtccccacacctggtgagaagtggagacacagcttctgccaggacagatggggcctgcagcccatgctctggccatcacacagggctacccgctcgttggtgccagcgccgctgggcaggctcatggccgtgtcgccccaggttcctttcccctgagccttcctggcctgaggttccacttctgctcacagcttctgctggggtcccagctggggagggggagatgaaaggtctggcccagatctgggacccagggtctcttactgtctcaacatggtgttgggggtggctcctgcaggttccttcagcaagcccacaggcccggctgctcaccttgtcctctattgcaggagacgcacacagccttggacagtaagccctgatttcccattatacagatagtgaaactgaggctgcaggcaggtaaattgctgccgctcctgggcccttaggaggctctcacagctcagatcctcagtgtctaggccactttgcttcatccagaagccagtgcagtgaggaaggagaggccacaccatggataagtgtgtgacaggccttggaggagaaggcaggtgaaggcatcaggaccgaaggctcactcggaggagagcctcaaggagtgaggctgggaagctcccacccaacaggcgcacacccctgagggcatcagaggaattcaggacgccatgtgagatgaggcctgggtggtgccagagggacagcagcaaggggggcccccagcaggagaggccctggtgggcagaaggggtgtgcatgccccagggatggcagcaaaagcagctatgtccggggctcccccacctcaccacaggtcccgccttgcagccatgaacaaagctctgagggaaagcagcaggtggctaggagagcacacccggagccagggacaactgagtttgatccctgagttcaatccctggctcagccactggccagctgtgtgaccttagtggctaaatatgtgtatatcacagcttcatcagtgtcaagctggggcaaaataataacctttctcccaccagccacccaccatcctcctaccatcccccctccatcctcctatcatcccccctccatcctccccatcatccccccatctccccaccatccccccaccaaccaaccaccaatctcatggccttctgtaggggccgatgctatgagctcttcacaacacatgggtggctggaatcagtgggtgctcaatgaaccccatcacagatgaagacagcggtgatgaggcacagggcagggtcaggctctgcctctaagtccctgggtggtcactagggccagtaacttgggcaggtcctgcagccctcagtcttactgctactcacccacctccctcccaggcactgtgggtgctagaggccagtgggtgcacctccctgaggccccaggctgctgagccaggagacccagggtcaggctccaaagggaggaaggacatgtgcccttagctatgggtgggttgtatgtcacgtgctgtgcgctgtccagctggcgcaccaagcacccagctcatgaaagggtccgggtcgtggccctcatcgtgcagcagccattggcaggtgcgttgtgccttgcttcctgcctttctcctgtccacaggctgcactctctgagtcctccctgaggcctggcgccccagctaggtgtggtccaggaagctggcatggctgggagaccgaaacgccctgagacgggccagaggctcaggcctggaaggaccctgagaaggcagggcccctcgccaagggggtgcaacaaggtggtctggaacccaagagaggagggtgacctaaggggggtggtgacagcatgaggtcacaggggtcatcaagtgctagttaagcagggtcagcagggttgggaggatgcacttttgggcagggtcctattacttgagtagggtcctggctgagttcaactgctccagcctctcctaactagccgtctgctataggggctgtggtcaccagcataggcacacgctgggacagacctcagggtttcctgctcagtcccctctggggctacccccaggaccccagggcctggatctgagagccatccatccgggaggagaagccaccagagttggcacatccctgtgtcctgggccactctgcctctgcatcccacaccccgcccctgtatcccccacccctaagcctcgggataagccatccctgaaggctgctggaggcgagagccactccccagtgtccaccagccgctcagtttcccatcagggtccagaagtattgattctcttaattggttgcccatagggaaccaaagaataaaaccaggcaaagcaaaatagagcattctttttcgttttccagaagtgtgatcagcaaagcctcacggttctcttacaaggccccaggcaccagccgcccacccccaacggagggaagaggcagtggtgggccctgggccaagcctcctggctggggcatctgataccctttcagaccgagcctctccaggctcggtccaggctcaccactggtacccctcagcagcaggcagatgcacccccacccccacccagccctgcaaccctcccagccaagccagggagggcctgaggatttcattatgagctcagattatcatcaaggacaagggggagtgatggggaagttacaagctctccttttaataatgaatcccatttcctcttggagttggttttcttgcaacagatgctgttgcagaaaatggaacaaaatggaaaagataaaaaggcaagtcattaacgtggccaaaaagccttcccagcagatgttggggatggcggggcagggtgcccacagcctgcccaccgcaccctcgcttggcccggctgaccagctgccacggcagggacccatatgttctcaggattcacggcttggctcggtgttgggaagcacagagccaccctcccgctgttcaataactgatgaccatttttctccaattaagctgaaattgaaggatcctcagacgtagacatccaagggaaataattagtgcttaaaatgttaattgtgctcagatatgcctgtgctgtggcggcagcttgccagtgagcaggcataggtaagtcaccttctgccctcaagcagcccccatcaggcaggctggtctccccagggacccagtgtgggcagcccaaggccaagaccctggcagcttttctgatggtggacactggcttaatgatagtgagacgttctgtgaaccccccagcctcctgcctgaccggcccaccgtccccgggcactggcaggcagcatcagagagtggttacagcaaggacatggaatcagacagctcgggcctggacccaccactctgccagcctacctgggcagcagtgtggatgagggtgacccacttaacctctttgagactcagtgagtgccctcatgccaaacagggatagtaaaacctatcctgctgaagcccccacgggagcgggatcatttctctgtccagcctttaacacccctcagcatggggcctgcggcaccagctcccaaatgaacaatgacagaatgagtgttttccctccaacggcgccaggaggggtcagggatcggggtagcagcgtggtgtttcccccttctgggcagcggaggggccctgcttggccagccattcagaccccaccaaccctgcacctaggattggatgagatttcctgcccaggggttggagtgagatttgctgccacagctgcctgagccccaggacgaaggggaggctccgcctagcgggtattggacgccccagctgcctgagcccgggagccctgggatgaagtaggggctgcccatgccaaccgcagttcccccaacctgcccgccgcctagggggaagcaccaccccctgcccggggagaggaattcactcccacagggattctcctgctcattactcgacccacgcgtgagccaggcttcgctctctgccaagatgacacgtctaagaggcttagtcttctttatgctgtggatcctgaggaaatccacttagatattctgtgttccctgatccgccacataagattcctttatctcttgttgtcatgggaagtatatattaactgattaatattaatgtgttggccgattaatattcatatctgaaccgattcgtatttcacaggcaacgatactgaggagcatggcagagcccagacagctgtcggttttaggcagttccccggggagtcgcagaagtcgcatctgacccttcccgccgccccacgttatggacaccctctcattagcagtgtctgtcagggctggcatgcaagtgtgtttggactctgattgtggcaattaaaatccttgccatccaagacagcatattttatcgtttaaatagcattttacattcttctaacatatttccccagtaacattgttaaattaggtgataaaaggttatttttgcttctgaagttgaaatacgttaccattattccttatctgcctggaattagaaaggtttcagaattagtgttccaatggtttcattatcaaaatttgccagactttataaaacaaacaacaatttttttgcccttgtgttcaacaaagatgggcaaaggctttgtcttctgacattggagattgctttcagcgttcggtggagaaagaagccacagccttccctgcagccaggggggtgcactgggggctgggggaaggctcgcttgcatttgaattggagccaccactgtcacctgtgccactgcctgggcatcagaggccacacaggtcagggaggtcactcttgcccgtgggaacggcacagccagagcctgcaccttcaccagggggagcggccaggagcctgcctatgtagcctgcatgtagcttctccatctctgctcctgtctccctccagcacccctttccagccccagccctttctaggccccatctccaatcttttcttcaggacttctaacaccaccaactgtcctccatctacctattatcctcccacccaccatctccccaccaacttcccaccttccccctaccaaccacccaccttcctcccaccacccaccctccatcctcccaccacccacccaccatcctcccaccacccacccaccatcctcctaccatcccccctccatcctccaccatcccccatctcctcaccatccacctgccatctcctaaccatcccccaccaacctcacaccatcccccctccatctcccaccatcccccaccaacctcccaccatctcccaccatccccccaccacccaccatcccccctccatcccccaccaaccacccaccatccccccaccacccaccatcctcctaccaaccctctccatcccccaccatcccccgtctcctcaccatccacctgccatcccccaccaaccacccaccatccccacaccacccacacaccatcctcctaccatcccaacaccacctacccaccatcccccaccaaccacccacccaccatccccccaccacccaccatcctcctaccactacccctccatcccccaccatcccccatcccctcaccatcccccaccaacctcccaccatccccacaccaaccacccaccatcctcctaccatcccccctccatccccccaccatcccccatctcctcaccatcccccctccatccccccaccatcccccaacaacctcccaccatccccacaccatctcccaccatccatatgccatccccacaccatctccccactaccctctgtgtaccatcctacctgacatcagtgtgccccccgtgtgcatctccccatcatcagtgcatcacatctgacaaggaagacacccttgtgtggtacaaaccccctcctcactcacacttggcagtcaagtgtgctatgagctgggcctggggcctcatacctgctaatggactgctttatccccgcacctggcatccccaagtcacccgggtccatgacctcttatgagcaaaccgtccttgctacagcactctaggctgcggggctcttccgagaacacatttctctctagaagaagcacaccaggcaggatgagggactgttctgctgggatcaggggaccttgccgtgcatcttaaccctatgcctgctctcatcccctttccctctgtttttggtttgatccaaggacaggatcgactttaccaaagaggaggctcatcctctcccagacgtccaaccaggatggagctttagcttgactggtgggaacagtccagggtgctgtgtggcagcccctcaagtgtttgcccacctgcatgcccgctccagcctctgccacgtctcacagggacaactgtcccagctgtcagaggcaggggtgacagcctctcaaatagactagctaagaacagagctgggagagcaaggctaccagtttcctcctgagcccaggctggggtccatgcaaatctgttgtggatgtgaaccttgaagttgattgcagatgatgtgaacctctgagatcctgctctgcagggccaggtcttgatggaaaaggatccctttctgctgagcacctgagtgagagatgccggctcaggggcacctgtctgcagcctgatcctccttcttccgagcagctcagccctgcagagccatcctagcctggcccatccttgtgtctctcacttgcggatgcagcagagctaaaggctggaaatgacattctcaggatgcccaccacccatgcaccccccaggggctcaggatggtgccttcctgtggacttccggatttccaaaatccctgctgtctgcaaccacagattttcacagaagcctctggcactggaaaccttctgatgcccctgtcaaagctcccaccgcctgacacacctgtgctgtgctcaccccgccccatactccctgttacacagcagcccttcattctgtaatcaactcccagacaaacagaaaacatgctagcagccgtcgtaagcatcccccatgtgatttattgccatcatcacaatattttgtttggagctgtaatcctccggacataaatcaagtcattagaaggaatgacgtttaatcctggggaagatgctgtggtgggctgagcagcagtgaatcacctctcaccctgctagtgaatcattcattctagaaagaacggccctccacacacctacctggcccgctcctcatccctgccacgcgcaggcgtgaaagacagaaggcacaagccaggcttgtttgtttcccggaatagcacatttcacaaccgcaaagaggtgcccaaaacacatgcccggtgctccagactggagccttaattcctccagaaatgcacgcagcctggaggggctgcctctgtgtccgtggtgggctctcttcgtcccgagagcagctgcgctggttggacttcaaaggaagcaggaaaacagctcagatatcttctttagctctcctttcacggtgaccccagacgccctaccaacagccattacatgggagcacattccgtttgcaaagctggcgggtctaattgcagggcctttggtggagatgtgcaggcagaggctaagcaaagagtttgaggccttgaaaggggaattcagggacctcgggcactgtcttccaggagcccagtaagctcctccacccccacccaggcaaacaccggcttccagttccctgcaaatggcacctctcttggagcaaggagacacccccaaagtgctggagagcgaagaacgggaagggggttgggtcttggctgacggattgccttagaagacttcatgttattgaataacgtgaatactgtgatgatggccaattccaggtgcgcatgaagatcgtgaaaataacagctatttccagtgtttacatctacttaatattctcgtgctcagagctaacgaggctggcgttaggcggtgacgtgggcctgtttgaaggatgctggaagtcgcgggcctaggttgcatggtgtgtgtctgggctgcctcccaaaccgaggtatgtggcccagatctggctaatggacagtttcacccaagctctgtcctgtttccagctgacagctgctacctgcaggtgctgctcgagtctgtctctggttcaccataagccaaggttgggtcttctcccccaagggctcctccattccctgagacctccctgtctgggggtcctggcagcatgctatgggaggagtcctccagacatttccctcaccctcacccctcatacccctgactcaccaaaccctctagccctctggctttgttgttctgcaaaatccaacatttccttttcctacccccgcccaacctgcctaagttcagatgtccccactcctcacctccatcataaggtaagaacctgaatttgttttcccacttccttttgggcctcactcttctccaagttccccagtcacctccagaatgacttctgaacatgcaaccctcaggagtctctccgccctccccactttccccaaccctgcagtcagcaccccagggctctggaggctgtacaggtatgagatgcaaagggcctgtggtttaggtgtgagtgtggtatgggggtgtggaggcagccccgtctggcatggctgtgagggggcagtggaagacaggctgtctgtgctcccatgatggtctggggcccccctggtcagcccacatggccctgtgggggctcctgctgctacagggtgctgggctgggcggaggaagagctggccattcaggatgggcgcagtggctcatgcctgtaatcccagcactttgggaggcccaggcaggtggattgcttgagcccaggagttcaagaccagcctgggcaacatagtaaaaccccgtctttactgaaaacacaaaatttagccaggtgtggtggcgcacgcctgctactctggaggctgaggcatgagaatcgcttgaaccaggaggtggaggttgcagtgagccaaaaccatgccactgcactccagcctgggcaacagagtgagacgcggtctcaaaaaaagaagaaagaaagaaagaaagaaagaaagaaagaaagaaagaaagaaagaaagaaagaaagaaagaaagaaagaaagaaagaaagaaagaaagaaagaaagaaagaaagaaagaaagaaagaaagaaagaaagaaagagaaagaaagaaagaaagaaagaaagaaagaaagaaagaaagaaagaaagaaagaaagaaagaaagaaagaaagaaagaaagagccggccattcagaagggagcagaaaggggctcttggacaggtatccaggggaggtgatgtccccacagccagccactgacaagcccaagattggcatccatactcaggtttggtgtctttttttaagagatgggatctcactatgttgcccagactcaacatgggagctcaaactcctgggctcaagcaatcctcctgccccagcctcccgagtagctgggattccatgtgtgcaccaccacgccagtattatgctcaagtttgacccctcaaagaagctggtgtaatcctcaggccagagccttccagagcttctcttgccccagcccttggctggacctgactccagcttcaaggccctgccctgggagattcaccccagctctgaaatgtagactgcagctatccagaccctcggcagggaagagccggactgacggccagagcccctgagtgctccgggcagtctctggccttgtccctgcaacctgtgaattgccagagtctctgttctgttctggtggggtggggtgggggggcacacaggatgacccctcagctgcagctgcccctcggtgttccctgagatgccagagagaagacactggagatgttggtgtaggggtgggggtgggcctggaactgtagctgcccattcactgtgcttgagtcagggccgtcacccagactccgggacccctgtgggtacagtcagtgaccatcagtgctcagccgtctgggagctcttccaaggatcagagcacccatccctgagcccctaggcagccctttgcagtctggagccccactctccccagggtgtctgcagagccccacccaggccagagcggcctgcagtgggggtcacttcaaagaagcatcacttaagacagattcacttttgtggctctttagggtatcacagcaacagctgtgacaggcttgacagctccaggccagctcggtaattgacgtggcagccagaacaatgcatcccaaggccggctggagctggaccgatcattttcttgcagctgggccacagtggtaatgaggctgccgtcctggctgcctgactccattccagggtgaagaaggacatgctgcccacgtctgcccctggagggcctgtctcagggctgggccagtgggtagggagcacttttcctgtaaacaggcatgtgtcagcacattcttgcactgctataaataaatacctgagactgggcagtttataaagaaaagaggtttcattggctcacggctctgcaggctggacaggaagtgtggccccagcatccacttggtttcttggcgggggggggcggtgctcaaagagcttttactcatggcagcgggcaagcgggagtgtgcgtgtcacctggtgaaagcaggaacaaagggtgagacttgggggcaggcggtgccacacttcacaacaaccagatctcatgagaattcattcactattacagggatggcaccaagccatgaaggatccccccatgagccaaacaccccccaccaggacccacccccaacactggggatcacacttcaacatgagatttgggcggggacgaatgtccaaactacatcaagacagcccctttatggggccaccccagcctcgggctccagcctgactcacttgcttctatttgctggtaaccccacaatgggaattcaccattatttagaccaaatgaggtgccttcctgcagagctggctgcagagtggtcaccacgtgccatgtcagccagacaagaggaggcgttgacatccgtcccatttaacccaccaggcatggtgctgtgaggtcacggctgctgagagcctggggtgggatcccggtgggcccagaaaatggcagcctccaggcccaggcccactgcctctacccctctttccctgagaagtgctggtatcatgcccccactggcccagaagagccacaggtggctgaatgagctcccacaggcacgtctgccccccgcacctctgaccagccacccctgatcccctaattccctctcctccaactgccctctggatgtctgcacttgggagacctgtagtcaggtctcctcaaagtccacagggatctgtcctcctgcgcagggaatagcatcagcattcaccactgctaaagtcagaagccagcgtctccctctgcagtcagccagtcccaggtcctgctgatgtagtggcgagttcaggccaacttgtcctggcccccaagggcccagccccacatgacatcagtagtttgaaatctgccatgatgggatttcagaccacggaaatcagcaaacactgcaaaccaggctgctccccgctcccaccccatcacccagaaagtcaggtgttcaacatttcccagcacacctccatctcccgaaatgttcttcaactctccctccactgtttcatcatcccctgggtccaggcctcaagagtctcctgcctggatagtgacagcaatcccctgaccaacctttctgctgtatctttgactccatctcagaatggtccttaaattcaaaataactccacaccctaaagctctttgagactctcctgggccttaggaggtaaggtctagtgtctttgcatggctataaagcctctttcttgccggccagccatcatggttgcccttccttccttccctccttccttccctcccttcctcccttcttccttcctttctcttttcttttcttttgagacaggatctcactctgtcacccaggctggagtgcagtggtgcaatcatagctcactgcagcctctaacgcttggactcaactgatcctcccaccttagccttctgagcagctgggactacaggtgcccatcactgtgcccaggctaattttttcatttttttttagagatggggtctcactatgttgtccaggctggtcttaaacttctggcctcaagtaatccatccatcttggcctccaaagcactgggattaaaggtgtaaaccactgtacctggccctgccttttcttgacactcttcagtctctggacccatctcttcatcccaggagccttgctttcatggtggaaggccatgaagctctgccagaaatgtcctcattaccctcaggtgccaatttattgtcacgatcttcaggagctgtcacctgcaacactgagctagctaacatgtcaactgtcccacattgcctgcaaagtcctccatggctgccatcacacatggagttgctggccagtgcctctcctccttgctagactggaagcttcatgagggcaggggccacactatcccattcctggttaagacactgtcatcagtacctaagatgctactggcccgtataggtgctccatcaatgtgaagtgaatggatacatgggggcagatggcaggatcattccgcgtggtgtactgcaaagtggaggccagccagttggtcttgctgtcaacatcccacgtgggaagcagagacagggcaagccagggagcgacactgggttgtgggatagggccacgcagttcgttctttcccatttgcagcagcaaccactagctctggcttgttcttccaggcccacatgtgttgaaggaagacaagcagccaggcacggtggcttatgcctgtaatcccaccactttgggaggctgatgcaggaggatcgcttgaggccaggagttgctgggcagcatagtgagaccttgcctctatgaattttttttttttctgagacagagtctcactctgtcatccaggctggagtgcagtggcacaatctcagctcactgcaacctccacctcccaggttcaagtaaggctcatgccccagcctcctgagtagctgggattacaggtctccaccaccacactggccaatttttgtatttacttagtggagatgggatttcgtcatgttggccaggctggtcttgaactgctgacctcaggtgatacacccgcctcagcctcccaaagtgctgggattacaggcatgagccagcacacctggccaaaatatacatatatatatatagtataaaaatatgtatatatgtatatatttttttaattagctgggcttggtggtgcacacctgtagtcccagctacttgggaggctgaagtgggaggatcacttgagcccaggagttcaggattatagtgagccatgaccacggcactccagcatgggcaacagaatgagacactgtctcaaaaaagaaaggaaggaaggaagtgggggagggagagagggaaaggatacataaaggaaagaagaggcatgatctgctgtaagccatgtgccatggactcctagaaaccacacagggatgtgcacacaaccacacactccccacccagggcacgctacatcacacacacaggaagcaggcacctgtgcagcacaaatgtgtgctgtggtgcatttcctcggcatgcctggtgtgacagaccataggacatgcacacctgatcccatgcgacatgcacatgtgtaaggggtgatgcagtgggtggcgcgggtgtgctggggtcacacacaccctgaacactgtagaggtcactgcaggctctgaccgagggatgctgagaagcaggagctgaggatctctccctgtagacaggcagggcaccagctcaggactccccttcccaacccactcagtgatgggcaggtgggtagatgtggcgcaggcgggacagccgttgggtttgtagactggctgaccagctgaccggctgactgacaggcagctctgatgctcgactctctgacagctccaagggaattcacgaccaaggctgagctgacaggaaccacccagctgaatcgtggatcctaatcactaaggcgagggaacagaatcactaaacgaaacaagtgcggtcagagccgtcaggcgctcatcggccagagacaggaagatgcaggctccgctcctctgcagatgcaccccagtgtcgctgcgctgggggcaggagctgcgctgcgggagattcagcccctgcaaagggaaccaggtgatcagcatgccaggagcagctgactttcaaccaatgggctctggctctgccccgctttgtgtcccatttggtgtgcacatttgtggatttgcaagatgcatatgtttggcacattttaccgatgaatttttagcccattttaccaatgaaacacgttcagcaaggtcaaggcacttgtccaaggtcacacagcagtgggtgtgtgcgctcagttttctctctttttttttttttttgagatggagccttgctctgtcgcccaggctggagtgcagtggcacgatctcagctcactgcaatctctaacctccacttcccaggttcaagtgattctcctgcctcagcctccagagtagctgagattacaggcgcccaccatcatgcctggctaatttttgtatttttagtagagacagggtttcaccacgttggccaagttcttgacctcagatgatctgcccgcctcagtctcccaaagtgctagaattacaagtgtaagccaccacgcctggcctgtcttctaatttttgatgtgctaagcctgcattaaaaactacaactccacatggaccctccagggtggtcctccgcgtggtccacagagggagggagtaagcctttgctctggtctgagccaaaggtcactgtgactgagtttgatcatctcagagcctaggggaagaagccccccacccagaggccaaagctggaggagagaggccaatacatgaccagtctgatgcagctctccagtgtgtctggcctgactgctgcctcccctcgaagtccacactctgaccacagagctgtcatcagggcccaggaacagccggctcctgtgctggggcagccctgccacctggaaccccacgtacctgtcccgtgtcctagggcagcaggtggccgtgactgtgacagaggctggtctccaggctgtgccctggggacccagcagagaatgtaagaagttggattttcccatgaacacagatgagaattgaagcccttgggtgaggcttttttccgggcgttctgtgcccaggagtccaggctgcccgctcattgctgcatgtgttgaaacttcagttttgcatctaatttgcatatgaacagcctgcctcagatggaggatgcagttcacagtgaggcagtcagaggcccatggggacaatgtgtccctcagccctggggcagtggagacctcacaagggcagagcctgagccggtgggagaggagccagagaaggtgtggcccggtcccaaagcaggccccggcctggcatactgtggatggtgaaaggagctggcagagccagtcttcatggccacccagccagggctgggggtggacagactcctccagtgggattgcccctgtctgcatctagccagggggctggcacctgctgcccagatgcgtgggcccttcccagctgggaggctccagccagaaccctgggcccagcttctgggaagccccatacccttcctcatgtccaaggccagctctcagtccagaaagcaccagcctttccacaggcattgatgggcattgtgccagaatgacacagatggacatgacacaggccctgccccaaacacaccgagaaccaacaacccttcactactgatcagcaggcgatctaaaccagcagacgagctgtttcttcacctccttcaggctatcctgccctgtcttcagaacatccagctgggcgtggtggctcatggctgtaatcccagcactttgcgaggccaaagcgggaggatcatttgagcccaggagttcaagactgcagtgagccaggattatgccactgcactccagcctgggtgactgagcaagactttgtctcttcaaacaacaaacaaaaaaacactcttaaagccccatgagatcacatgagaccctgtctgtactgggtcaaattgggtgcccgccccaccctcaaaaaatgctcaatcccagctccctgtgcttgtaaactgtgaccttgtagggtctttgccgatgtaatcaagttaggccactagagtgggccctttttaaaaacattttatttccataggtttctgcggaacaggtggtgtttgattacctaagttctttagttagcggtgaatggtgagattttgatgtacccataactggagcagtgtacactgcacacaatttgtagttttttatccttcacccccttcccaccctttccccgagttcccaaaatccactgtatcattcttatgccttcgcatcctcatagctcagctcccacttatgaatgagaacatacaatgtttggttttccattcctgagttatttcacttagaaaaatagtctccagtctcacccaggtggctgcgaatgccattaattcattcctttttatggctaagtactattccatcatatatatatatatatatatcagagtttctttatccactcgttgattgatgggcatttgggttggttgagtgggccctattttaatatgactggtgtccttataagaagaggagaagagacacacgtgtgcaacagctgtgtgaagacgaagcagagattgatcttctgttgttgcaagccaaggaacgcctgggctgtcgaaagctggaagagtcgaggaagcatcagcccgtacccaagaggcagtggagggagtgtgaccctgctggcaccttcatttcagacatctagccttcggaactgtgagagaacacatttttgtcattttaagcctcccagtttgggatactttgttacagcagctgcaggaacaaaccaaagcacctcccgtgatggttaattatatacgtcaccttgcctaggccatggtgccacagggtttagacaaatgccagtctttgtgtgtgtgtgtgtgtgtgtgtgtgtgtgtgtgtgtgtgtcagagagagagagagagagagagagagagacggagtcttactctgttgccaggttagagtgtagtggcgcgatctccgctcactgcaacctccacctcctgggtttaagcgattctcctgcctcagcctttcgagtagctgggattacaggcacacaccaccatgcccagctaatttttgtgttttagtagagacgaggtttcaccatgttggccaggatggtcttgatctcttgtggtctcgcgatccacctgccgtagcctccaaagtgctgggattacaggtgtgagccaccacgcccggccaggaaggcattttttagatgtgatttgctgtaaaatgtgtagcctttgagtagaggaaatgaccttccacaatgtgggtgggcttcatccaattagttgtaggcctgaagagaaaagagtgaagttccccaagtaggagggagtctcggacctccttcccatgcaagctgcggcaccaggtcttccctgggtctccggcctgctggcagattttagattgccagcccccagaatcacatgagccagtttcttaaaatcaacccgtctcgctctctcctctctctctcttcttcttcctttcctccttctctcctctccctgtctcgcttccctctctccttctcccctcctccacctctacctctcccttccctctctctttctctccgtctctttcccgcctccatatatatcacctgtgggctctctgtctctctgataaccctaactagcatgccacccccccattcagaacccttcatacttcccatggagtggagcctggcatttccctcaggcctctctcccccaacccgcccaccttctctcctgccagcaccctgcactcggggcaggccatctgtagctcagcactgcactgtgaggtcaggtgcgtgaccagctgtggggctgccccagggctcggaggcctttcttgtgtgcaccttaggtgtgggagctgcttcttcctaatgggggcatggaagcagcagggcagaggccggcagcctgggctgtccgggacaacagtgttcatcccaccagatgccactgtaaggagtccaggtggagccgaagctcagaatccgggtactgcacgtgctgaggaccaagatgcagtcgggaccttgccttcagggaactccccacccccagtcgggccagcctgagccaagagaagcagccaaaagccctggaggctccctggcctgttgggcaatggaagtggacgtggagtggacagcgccaatgggtgtggggcaacctgccagcagactcagccaccagaagccccgggcacatggaaacgcggccacacaaacggccccatcaggaaatcccaaaagaccaagaagcacgactcaaactccaccacagacagggacctgggactggcatggccgctcctgccctccttccccagttctctcccatgcctgtccctctgcagatttgactctttaaggacagtcgcagtgatgggagtggcgggacactagcatcatcgcccatcagggctcggggctgggacatgagcagccaatgcagccgtcattctcccaagagtgagccacctggggctgggggaggccaagggctcattcgaggcagttgggtcctgtcctcacctgtcagtgctgcctgtctacagggcctgaccaaaaggctgctccccagttaccaccctccatggctcctgggcagtggggattggggcttttgtgtggcaccctgcaggtcttcctcctgtgagcctagagaggagcgggcaagagacccttctccttggacatgctggtatagcctcctccccaactctgccccaaacccaggcctgatgactaagaaactggcctcacacactcatcagtctctgcctctcctcaatcaggaggcttttcagctaaacgctgagaacttcagccaatgaagagttcacactgtggaacacatttggcagtgcccataactcacgccttgtttattctcaccgatgctcttatcatagcgcatgtgttccagccactccacgcatgtcatctgtccagaaagagaaagtgcttgtttatttcttactgtgcggggggatggagctcccttacagattgtgaaccttatattgacaggagaagagaggtaactcaagacaccgaaagtggggtgtgcgtggttggtcttggattctgtcgcaggggtggaggtggggaggcagggaaggtgcgtggcagcattggtggcgttggatggaagaggaggtgggttgtggctggagttgctctgcaaggccactgatgttatctagattgtacgttttatttgggggcttgagaggggctggaggtggttatactgaggccaaaactccttcccacccataagtgccccccacggcactggtaccactgacccctggtggcaaaccttcctcatcctcgtgagcccttagctgtacttccctgagcgctgatggagctgtccagggtcctgacgtgcagcccacttggggatgtgcagacccctgccccaggatacctaaggtttctcctggttttcacttgcccagagccagcagtggtttttgcttcagcctttatctgactggtgcatggaagagcagttttcttcctagtggggacactaggttcacggcaaaggggaggtccctttagatttccttcattacgtttcttctttattcgaaagtgaacttgtagccaggtatggtggctcgcacctataattccagccctttgggaggccgaggcaggaggatttcttgaggccaggtgtttgagaccagcctggacaacatagcaagaccccatctctaactatttctaaaataaatgtaaattttttttctttttctttattttattttatttttttgagacaaagtctcactctgttgctcaggctgtagtgcagtggtgtgatctcagctcactgcaatctctgcctcctgggttcaagtaattttcatgtctcagcctactgagtagctgggataacaggcatgcaccaccacacccagctaatttttttgtatttttagtagagatcgggtttcactatattggccaggctagtctcgaactcccggactcaagtgatcagcccatctcagcctcccaagtgctgggatgacaggcatgagccaccgtgcccggcagtaaatttttaaaaatgttaaagtgagcttgtggggataggtctaatctttgcctgataagctgccgtaagtctaagggttgggaatagcttatggcaaactcaggctctacttaagatgttactgatctctcttactctccacaaggcaatttttcctttcaaaggaggaagttgcaggcaggttggctttatggacacatgtaaacaggaaatcaggagactcgcccagccccaggctttgtctagaaggaacttttcctctagttaatgccaagggctctagctcagcgagcattagagtgggacagccccagaagcttaggctcagagtccagaggtccaggagacagtgtccccctgtccagtcctcacaggtaaaatggaacaggaccacagcccactgccctccgaggctgtggggacagtgccagtgggaggtcatggcctcaggggctgcaacctcaacaagcacatggccttccatcttccccccgactggcaggatcccttttggaagtggcttctcagccccactcttggccaaatctggcatgactcatttgctttagaaaaggaatatataagcaccgtcacaccttgatgagatgacaggagtgacaagcagagtgatttcccatatctgagactctgaggaggagaggtggtttagcagagccagctgccataaccagaagaaaataattaaggaaatctggcagagtagaggaaaaccaagtggtgcagcgggtcccttctagtgaagggagctgtcatcatcggctgcgggagagaaaggagctctggaggctcgtgctgggacagctgcagtaatgatgggatggggaagaggagggggtggctgtcaaggagggaaatagactctgggcatggcagggggtggcaatgagcagcttgattctaaagactcctctctcaggccaggcacctgctacttacaccccacaccctgaagggtgcagccaggtctacttggagcttcccctcagtctccagggaagagtctagaaggcctgtttcaaagatcccccacatgcacgcatgtgcacataagcttgggagtgcccaggaagatggggacactctgccctttgcccaggggagagcatacccttgttcccagcccaaagggacaagcggaagaaagatgaaatgtgtcccagttctgcctgcatttctgcctctcttgggacttgaggaaggttcgggcaagctcagggaattcaggctgtccattccagggctgaccttgcatctccttcctggcctgctaatgactgaaggagacgtgcgggcacggcctcagccttacattgtctggggcatggcagtggctgagtctgtaaaactggacctcatggagaaatccacagaatctctggctcagggaagacctggagatcccttcaccagctgggctcctgccactggacctctgcccaggacgtggagacagccaggaaagtggtgggacactggaacccccctcccgcaggcagcagccaggatttgctcaggtgtggtcgggcatggtgccccggcgcgccagccagaagatccagctctctccttaagggatagctggctctgatggtgaccatggcttttggcagagcctcaggacgaaaatgtccacccacatggtactggagcagaaagagcccctgattcctcggtggccaggtagggactggggaaggaggctccagcttctaaatagattccccccaaagggaatctccttgtcctcctgcgactttcccccaaagcagaccaaatgaggtatgacacagaatattctgctctggccaaaggttcacctcaccagagcttgcttcttaggtgagcccagcccaggcatgggcctccttggtaggcagagggggcgttccagagcatggccattgatgcactggtctctctgtgtcttcctgaggtcatcagtaagttaacgctggacaattaccctctacctgggcgctgcttagggctttgggggagaccagggcgagcaagatatgcttagctcaccccagaactccagagccagctgagaaggccaagatcacaaagcaaatgcccaggttagggaacttcctgtagcaagaggagaagaagcacgttccattcctaggcctggtgtgtgcaaaggtgtgggtgtgaatcatattccaagcatagagaatccacagtggccagaactggggcatggctgatggggtgtggagagagagtggatcgagctttctgaagggtcctttccctgtgacttaatgacatggtggggtgcaggaggaggtggcctgtgagagtcctggctgctccacagggcaggtatgggcacacctgggcagggtgcctttccagaccttgtagatcacatcaggaggcaggcgtgatgcagagaagagagcctcagctgcgagccagtgggaccacatgtttgctgcgtccccattttctgcatgggtaggggatggaggggctccagcactgagccatgccctaagctgcctttccctagagcctaccccaagatccctccagcctggatgtccacagccagcagcccataagcagttccctgggagccatgtggcagatccgctaatactgtcctctcctctgtttgcttttcaggaataaagttcaacatcaggccaaggcagccccaccacgtaagttctgagagtcagataaatctcagtgcacacagcccttgggaaactggggagggctgggaagaaaattaggagctcacattggatccattcttggaaagaaaaatgtgtccagcctttcccaggagccttgggaacaaagcccagggctctggacccatgaattttcccttccttgttagaaggcttctttgcacggtgctaatagaggccgtaaatctgagcccgcctgcaggccacctattcccgccaccctctcccaggccaggttcctgggaggaccgcgccatcttgtggccgaaatgacacttacacctcagcgggagggaggcctttgggtgccgggccagggctcagaccggaggggtctcacctacagagtcagcctgtctccctcacctgagagggacaggaaccccagccgtggtgagagcctgacctgtgtggccctcagtgcccagctgtcctttccactcagataaccacttctcttcttgccccaggacctcccaccaggcggctcccaggatggtgacttgaaggaacccacagagagggtcactcgggacttatccagtggggccccgaggggccgcaacctgccagcgcctgaccagcctcaacccccgctgcagaggggaacccgtctgcggctccgccagcgccgtcgccgtctgctcatcaagaaaatgccagctgcggcgaccatcccggccaacagctcggacgcgcccttcatccggccgggacccgggacgctggatggccgctgggtcagcctgcaccggagccagcaggagcgcaagcgggtgatgcaggaggcctgcgccaagtaccgggcgagcagcagccgccgggccgtcacgccccgccacgtgtcccgtatcttcgtggaggaccgccaccgcgtgctctactgcgaggtgcccaaggccggctgctccaattggaagcgggtgctcatggtgctggccggcctggcctcgtccactgccgacatccagcacaacaccgtccactatggcagcgctctcaagcgcctggacaccttcgaccgccagggtatcttgcaccgtctcagcacctacaccaagatgctctttgtccgcgagcccttcgagaggctggtgtccgccttccgcgacaagtttgagcaccccaacagctactatcacccggtcttcggcaaggccatcctggcccggtaccgcgccaatgcctctcgggaggccctgcggaccggctctggggtgcgttttcccgagttcgtccagtacctgctggacgtgcaccggcccgtggggatggacattcactgggaccatgtcagccggctctgcagcccctgcctcatcgactacgatttcgtaggcaagttcgagagcatggaggacgatgccaacttcttcctgagcctcatccgcgcgccgcggaacctgaccttcccccggttcaaggaccggcactcgcaggaggcgcggaccacagcgaggatcgcccaccagtacttcgcccaactctcggccctgcaaaggcagcgcacctacgacttctactacatggattacctgatgttcaactattccaagccctttgcagatctgtactgaggggcgccgcagctggccggggccgccctgccccggtcactcacctgtgctcccgggcatcctcctgtccctggctcctcatcctgggagcaacagggctctgaggacgtgaggagccatcgctgtgggaggcagcaggccccgggtggggggcagaggcgcccagccttggatggggaccccagcccctggcctgtacctgtttcctcattccttggctgagggagaggctgagaactgggcagacacccctggagctcagccgacagttttgatgagcagggaagtctgaggcccagaggacggggggcccagcggtaagggatgtcccgcactcccttagccattgccttggaccaaaccacgtggtttgcagcttttctacgagccaggggggaggttcccttggattaaggttccaaataaagcacatggtttccagagcagcggtgtgtactctgtggtggcgtgggagcacgtggaccctgggctgggctttctggggctctttctgccttcccggggcagcttgagccaggtgctgcaggccccactgcagagaagtccagttcaggagcagcttcctgggagaagagcacagaggacccagcggctctcagccaggacctgcaggcgtctgaggctaggtcccagtcaactggggtgcttccgtctcagtcctggcacattaatcctgaaaggaaaagataggcctgttcctatgggggcctcctggggtgtcttcttatcagtgcaccttgcaggggcctctggggactgccagagcagtagccagctctccaggcaagctgccaatcagggctgaggccggagccagggggcacggggcatgcatctcggtgggtgtggtactcccagcaggaagcaaggctgtccctggctttctgcacctctgagccaagcaggactctggcctgaggctgtcatctgcagacactcaccctgatccctggccccactcaccctgatccctggccccactcacctgacaaaaccacctcagggctgtcaggatgcacatgctctggaggaggagaggagaagccatagaggaaacttctccaaaagcatacatgttcacaccagagagggctccagaagtgtcagcagtcaatgtggttctgggaaggtctgggaggaggtgtttgttggagtgttgagtgtgggcatgagtgtggctgcatttgggttttgtttgtgatgggaagggctgcctgactctggagtctctgccctctgtcagcctgtctgcaggagcctctgcatgccctcctgggtcattctgtgggttgctctgtgggccctcccaggaggctgccctctgtctgtccctatttgctaggggagatgctgctgattctccacgtggaggtgccactggatccctgggtggacccccaggtggaggccctgctgattcccaggtggagaaactgccggatccccaggtggaggaactgctggatccccagatagaggaactgctggatctccaggtagaggaactgctggatccccagatggaggaaatgctggatccccaagtggaggaattgctgatccccaggtggaggagctgctggatcctcagttggaggcgctcctgtattactagttggaggtgcttctggaatctccccaggctcacaccagcctgagctgctccatctccttttctgcctccatcttggaccctggaacattgcaaaggggaacaaggcactgagccttcctcctgcccctttggggtaacatccatccaggagatctgagaagcagggagacctccctcgggttccagctggaagcggcttggaccatccaacagaagtgacccagaggggcagggaagaggctgtggtcagggcctggggaactcttgggacccgtggaagctgagacagcagatgctgaggggcccagaaagccagagtagctgccctgcaccttggccaggaccagggtccatgtgagaggagacagggaagtgcctggctgaggacaacctaaaaagaggtgccctgggtcccggtgctcaaacgtgagaccacgttcatgtgcaggaaagtgtccctggtcatgggtgcatttggtgaagccagaggcagtgcccctatggcatctgctcagcagggaacacctgaactctccgctgacacagcatctgggagcagcttggagacagtgaggatgacacagcccctcccctgggtgagcgtgtgtgtgcgtctgcatgtgtgtgtcgggggagaaggcacatgcacttgtatcatctctcagagaaacgccggctcaagctggacagacgtggacacacaacgcatccatcagtggggggcttttgttgcaggtggtgatgacagaagacaggtgcaggcagtgaccatgatcaccacttgacagccctgagagtgacctccaactgaaggccagaggcccagcctggagaccaacccagctccaacccccaaccccagccccaaacctcacagggctcaggaagagccgactcagtgcagtggtagggaagtatgtgtgtgtgcacgtgtgcatgtgtctgtgtgtgtgtctgggtgtctgtgtgggtgtctggcctgtgctgtggggtgggtggatgtgagcgcgtatatgtctatgtgtgtgtctggcctatactctccacatgtgtgtttgtgagtgtgtgtgtttggcctgtactgtgggtgggtgtgagcatatggatcatgtgggtgggtgtgtttgtgtggatgtctggcctgtgctgtgggataaacgggtgtgagcatgtgggtgtgtgtgtctggcctgtgatgtggggtgggtgggtatgagcgtgtgtgtgtgtgtctgtgtctatgtctgtgtgtgtgtgtgtgtttctgccctgtgctgtagggtgggtgggtgtgaacgtgtgtgtgtgtctctggcctgtgctgtggggtgggtgtgagcatgtgtgtgtttgtgtctgtgtgtgtctctgtgtgtatgtctggcctgtgctgtggggtgggtgggtgtaagtgtatgtctgtatgtgtgtttctgtgtgtgtctggcctgtacagtgtgagtgtatgtttggcctgtatcatgtggatgggagtgagcatacaggtaatgtgggtctgtgtgtctgcgtgggtgtgtgtctgtgtgggtgtctggcctgtgctgtgggctaaatgggtaatgagtatgtgggtgtgtgtggggggagggaggtatctggcctgtgctgtggggtgggtgtgagcgtgtgtgtgtgtgtgtgtttctagcctgtgctatggggtcagtgggagcgtgtgtgtctgtgtgtgtgtgttcctggagtgaggggtgtgcattgtgtgtgagcccgcgtccatgccgggtgtgggctgtgtgcagtctgagtcctgcccgtctccaggaccatctcgtgcacctgctcctcgtctctccctgcccattcgctggccattttgtggatgtcacctggaaggggccaactgatcagagaccctagaaagggccactggcagctcccaggggcaaaggaggcccattgagttgggagaagaacagcccaagccccagggccctccccagcttggtccccctgtgggcccctccgggcggccccagggaagtccctgccaggcctctgcccttgagtggctgagacctcctggatgggagccccactctctgagtggtgacgagaacagacgtcccaaagcctagggtccctcctggggcttgggagccccaaaggccttgagtatcctggggagataggattcaaggtccacacagatggtcaggtgggaaactcgggcagttctggctccccccagctccccctcctccctgctgtctcgacagggtttggtggcccatacagggcctgtccaaggggcccaggacaaagtcaggcaggcagtggacagggggtcccccatcatctccccctactctcaggcagggtttgccaatttcatcctcagggctgagccccttggtgggggacaggagcctgtggagcccatggttctgaggcctggaggcggcctcacctcactgcccctatctcttcttggccccttcctcttcagggagcactcgtggtgaacccagcgaacatcctgctggcgtccctcactcctccactgctctacaagcccaggggacccagagctgggcacaagaggctgtgttgaaccacgggatccagaaatgggcaaaggtgaaagttgggggtggggtagtctgggctcaagtaacactgcccctacctccggggactcccagctgatgggtaccatgactcctgaatgaggaataggcaggcgccccggggagcagggtgtggggagaggactgtatgttagccccactgccctgcccgggccggggagggggtgtgggagccctgagctgggttcttcacactgccctggcctggctgcttgttggcccttctcactgcccagggcacgctttgcacaagaggctctgttgggagatggcagcagagggggacccggggtctgggccaggccggggctactaggggactatcctcctgcctctccttcaccctgggccggcctcaggaaaggaggagcaggggagcagctggaggtgccaagagctctggaagctagggaagggggcagggggcaggggcagagggcagagagagcaacttcctgtcacgggcctgggcgacccttccgcgccacctgggtatgccagcctgagtcaagtggacagtgagtgctgagcgtggagaagtgcaggtgcgtgcgcgaggtgtttaaagaggagaccaagggactgggaccctgagtgtgtcgggggtgcaggtgtcgggggtcactcgtgctgggtgctgcgctgtggcctcgtgtgcgttgcccagtgcccctctcccagcggtgctgtccactcatgcctcgctctactgtataggtgagaagactgaggcacagaaaggcgtggccagagctgtgcagcgcaggagttggagctgggattgcgcccaagcggccggcaggggctccctcgcgttcgtacccacaggcgcagagccgttctccgccgccaggtggggctaagtccccgctcccgagcagcggcttggggatccccggcggggccgccaggtggcagcagcgctctggccgcgcggctccagctcccgggcgccccgcgtccccagcctccccaccgcgcagtcggctcctctgtcacctcgccctcccaaccatggggtcacggggctcccgcccctccactgtctgcgggcggcctccagaggttactctcaaacccaccagctccaggggacccgcctgtgctaacactaagcccccaaacacccgcagcgcccctaaagcagtgacatccacaacctccccgggggcttgtcctgcacgctccatcagggtgatgtcaggccttctccaacctcaaccacaacacgaacgcacacgcgcaaacacaaatgcatgcacacacacaggcacagacgcacagacacacacaaccacacacacagacacacagacacccatcctcacaaacacacacccagacagatatgcagacacacgcatgcacacagacccagatgcacgcggacacacagacacacacgtaaacacacagaaacatgcacggctcaggacggggcttcttgctgcattgaaataaatgggaagaaccggaaggtccctcactgtctcagccaagtgcatgcacttcccacgctgagccctgtcctccacttcccctcctgcactggccagaggtcacccccgacacacacacacacacacacacacacacacacacacacaccagatcccagtcccttagcctactccttaagcacctcccgcgcgcacctgcgccctctctgcacacacagcaggctttcccatcagcagaaaacaagctgtcaatgccccacctttaaaaacggggaagccgtagccagatggcccctgcagcgcctgcccatttctctcctctccttcctggcagaacccacccctcagcccccatggcttcacctccttttccactctggaccccaccctggcctgccttccaatcttgccacccgcagagtccgctgacaaggcaccttccactgccgcacgctggcaatcccaggcactcttctgcctacacactccctgggcgagctccccatcacccctgtgctagactcccggatttgcccctgcagccctgatcggtagacccccatggccagccgcctcacccccagctgtcggcacgtccagcgggtgtctccacttgaacgtctcacctgagccgcacacctttcacacctcaagcccctcctctcccggcttcccggctcagccttccctacaagccctggatcgtccctttcgccctgcctcccaagggcatactgaatccatgtccattctccctctccagggctgtcatttaacccaagccattatcacactagcatctcctgccttggcacctaaagtaataagtaactatggaatttaccggtttaccaggtactgctctaagtatttcatattttttgtaccctgcccctcgcgatcccggctgactgcaaactccgcctcctaggttcaagaaattttcctgcctcagccccccgagtagctgggatcacaggggcctgccaccacaccgggctaatttttgtatttttaatagagacggagtttcaccatgttggacaggctggtctcaaactcccgacctcaagtgattcactcgcctcggcctcccagagtgctgggattacaggcttaagccacctcgcctggctagcgtttcacatataagagcttatctaatcctcactacaaccctggaagaccgttatcatcctccccattttttgcagatgaagacattgagacacagagaggttaagtaatctgcccaaggccacacagctataatggggatcttccagaattcagagcctgatggtttggccctggctctgtgtgcccatgagtgcacagttcttactggctctctggtgttccaatggggtaggaggttttgcgacagcagagaaggaattgaatggtcactagggcaagggaaagacaagctctctggagaaagagagggagtgtctcaggcattgctttgcacccatttgcagtttatgatggatgtgcagggcaccagcatgccttcctgctgcagcataagcaaggtcacagcggggctcctcctagacctgtgtgacagaggagtgaaggacacagagaatagtcacccaatcaggacaaggctggatgaggaagggcatcaagacaggaagggctgataggcagagagaaggcgctggggtctgcggaggaagtgaggcgggagttggggacctgtgaccttggagatggtgtggtttcctgtggtgacaggcaaactgtggccaggggtggcagtggccaggatcacgatgatgactttcacctctgcccaccatgataatctcctggatggagatgacctcggttccagggcttgtgaacaagtcacgccccacagagggaccctcttcagcctcctctggggtctggtgacacggtggtcctgtacctgtgcctctggctccatcagttcacacttgctacctgcctgcttacctgcctgctgtcacctgttccagcctgtatccacctgcctgtgactacctgagtttgcctgtgaccacccacacccatctgtctctctctgccttggtgggtggtggttttggggctacaggtcagccccctcctccgcgtgcagggcctgagagcaggggcgtgggagacggagtctgccaatctggccgcaccagctggagatgagcccaggactgctgacgcctccagcctgcctctggggagaccatgctgtgtggatgacagtcccctaagacccggaagcgagccacgtctgggaggatgagatggggtcggcaaatctgggccgggagggaaggctgcattcttgctctccaaaccgatgtgctgaattttacttttccttttagttatttcttcttcttaaatcctgtttctctccctgaggcagctaatctattatttaacatcggattgtgggattgaaactccaaggcaaattgaaaattatttgtgtttgaggtttcaggcgtgaagctgaggcaaccatttctgagagatcctgagaacccgggcaaaggtagcgaacccacagcactgttcctggaaggggctgagaggactggggtgcaggaagcgttccacagacctggcaggctggggggccccgctatgctccagccttgcccacccaaagcccgcagctcgggggtcattaatctccatgtggcatttcacttgggaaatgctgtcaacacctcccactggccaaagtcctcaagaggctgggcaggtgccatcagtcaccctgggcctgtgcccaccctgggggaaatgcctcggtcatgagaggattaatgacacgaggagaagggctcgtcatcatttttcaaggttcggctctctgtagatctgcaggcaggattgctggcctaacagtcagtggagagtgacccaaggctctggagagtgaccaaggaacacggctgagggtggggggccctggcctggacccccgctgagtgcccgaagactgatggagcatgcgacctcctagcgctggctctcaggacatgaatcgggaccagaaggaggagtgggcttgagcccaggggagtgtgaacaaacactgtgtgagccccacatagacatctgcggatcacggaatgggggaactgggagacgccaggtcagggagatccttggattttggataagggataaggagattggattttgtgttggaaacagcggaaccattgaaggaggggtgtactacggtcaagttccatgcccagaaggatccagaatgaggctgaggggctgtcttcatccatcttagtctgtctgggctgctacatcaaaaatcccatagactgggtgactcagacaacaaacaatttctcacagttctggaggctgagatcaaggcgccagcagatgcagtgtctggggagggccggtttcctggttcatagggggccctcttcctgctgtgaactcatggcagaaggggtgaggagctccccagggcctcgtttatcagggtgctaatcccattcacgagggctccacccttaggacctaatcaccaccaaaaggccccacctcctcacaccatcactttggggttgaggatttcaacataggacacaatattgtcaggggacattcggcgcatagaagaggctatcagcacatctccatccaacacttagagcggtcacacgtgtcaggccttgtgctagacctgggtgatggcacccttatgcccccagctcagaacagagctgagcatcgaggatctgggaccacagagaagtgggaggagtctcccacaaggtcctctgccacccagatttataaaggaaagaggtttaatcgactcacagttccacatggctggggatgcttcaggaaacttacgatcatggcagaaagggaagcaaacacgtctttcttcacatggcagcaggagagagaagtgccgagcaaaggaggaaaagcgtcttataaaaccatcagatcttgtggaactcactcactattacaagaacagcacgggggtaaccgcccccacgattcaattacctcccagtggatccctcccatgacacgtggggcttatgggaactacaattcaagataagatttgggtggagacacagccaaaccatatcaccgtgggatctcaatgaaactgcagccatagctgcccatcatgaactgggtcctgtcagaaccaccaagtcaaaaggccaagtggactcagcacctcctatcaaaagatagaagttggccagatgcagtggtcacacctgtaatcccagcactttgggaggcagaggcaagaggatcgcttaaggccaagagtttgagaccagcctgagcaacatagagagaccacgtttctacaaacaaaaagtaaaaaatcatccaggtttggtgatgcacacctgcagtcccagctactcaggaggctgaggcaggagaattgcttgagcccaggagttggaggctgcaatgagctgtgattgcaccactgcgctctagcctgggtgacagagtaagaccttgtctctaactagtaataataagatagaagtggcacacccaggatcaagtgcaagcagggtgggaggacacaagcgagctgtgtgagcagggagcctgggcaccttgggatccccactgctgcactgagacctcttcctcagtttacctctgaggccatatggtgaggggcatgatcagctaatgaaagaggaaaaggctagagcttttttcacagatgtgttggcttgtgtagaagcaggtaaaaagtggatggtggccaggcatggtggcacatacctgtaatcccagctactccacaggctgaggtacaagaatcacttgaacccgggaggtggaggttgcagtgagccaagatcgtgccactgcactccagcttgggcaacagagtgagactccatctcaaaaaaaaaaaaaaaaaaaaaaaaagtggatggtgaccagggtacagtggtcacatctgtaatcccagcacttcaggaggccaaggcaggaggattgcttgaggctaggagttagacaggcctgggcaacacagcaagacccccatatctttttttttttttaaataaaaattcaaaataaaagctgatggtgtctgcactgcagcagtggatggtgtgtgcaccacagctccacccaggagtggcctggaaagatggtggtaaagtgaaatactcccagtgggtagagctttagacaccggtcatccactttggtgaaaagggaaatggcctgagttcagaatatacatggactcatgggcagtggccgatggcttggccagatagtcaggagcctagaaggagaaagattagaagttaggagacaaggggaagtcatgtggatgggacttggcacaaagtgtgacgatgtctctcacattagcactcattggaagaggcaccaagcaaccaagtgggcagaactacttgggtatgcaacatcagccagcttctgtcattggcttcttcacggctggtacaaaaagcacacacaaggaggacgtggtgacagggatggaggttatgcatgggtccagcaacaggggctcccactcaccatggttgatctagctgctgctattgctgctgccaaatctccaattctccagtaacagagacccacactaagtcccaaatgcagcatcattccatgaggacaccaacctatcacttggtggcaagcccaccacactggatccctttcatcctggaaggagcagtgattcattttgtcaggaataaacacaaagtctgaggatgggtttgcctttcctgcccacagggcccgagccagaccacaagcccaagggcttacagagtgtctgatgcacagcgcagcatcccacgtgccattgcatcagataaagggactcactttacagaaaggaggtgcaagggtgggctggtcatatcatctaccgtatccctccgaatctgctaatctgataagcaatggaagggcctgttgaaatcacagctttttgcaaagatgaggtgccattctccagatgaaagtaggtaccttaaatgaacaaaaggtggacatgggtctacctgggtgtggtaggcagaatcatcacccttttcccccaaagcgatctgcatcctgactcccaggacccgtggttatgtaaccttacatggcaaagaggaccatctagacaggatgtgattaagtgaaggatcttgacgtggggaaattatcctggattacctgggggtgaggggcggctaatgtaatcacaagggttctcctagctgcaagaggaaggcaggagagtcactgtgggagtgatgcagtgtgaaacggattcaaccagcctttgctggctttgaagacagtgggagccatgagccaagggagcaacaggccccttgaagctgagaaagacaaggaaatcattcctccctggagcctctagagggaatgcagccctacctacaccttaatttccaccctgggagactcatgttggactccaacttcctgagctgtaaagtaatagatttgtgttgttctaactcaccagatctgtggtgtgttctcacagcagcaacaggaaaccaacaccctatgtcctaggtaagatgggtctgggaaccaaagagcggatgcaagaggtcctgcttaccctcatgctcatctgcccacttggagaacatgtgcttcttgttcccacagacctgggctctgaggatttggaaatcctgcttcccacatgagctatgcgtctatcaatgaacacggcaagagtcctgtggaactgtaagctgtggctgctgcctggacactttagactgcttgggctaagacaccagcaagcaagatgagttaccctcttggcaacttagctaagtgacatcagccagcttctgtcattggcctcttcatggctggtacaaaaaacacacacgaggaggacgtggtgacagggatggaggctatgtataggtccaacagcatgggttcccactcagcatggctgacctagctgctgttgctcctgccagatctccgattctccagcagcagagatcgatgctaagtctggaatgcaccaccattccatgaggacacccacccttcacttggtggcaagccgaccatactggatcgctttcatcctggaagaagtagtgactcattttgtcaggaataaatacatattctgagtataggtttgcatttcctgccacaggacctgagccagaccacaagccctgatcatcagtaagagggagcatttttattatacagtggggctgggagaaatctatttggtgtctggttaatccacttggatgcttttcgatactcccttgcccagttttgacagcgaatgggcaagtgcagcaactctggtctgagaaggtgatgttggccagagtctcagacccctcagggatgaagatctggtttttccaccaggtaagcccctgagaccaggttgctgttcgctgagggtgcaggagtcctgaagagataataaggaggagagaagctgagtatctgttgcagctccaagaccaactgtgacagtggaggctgtaatctttttttttttttttttttttttgagacagagtcttgctctgttgcccaggctggagtgcagtggtacaatttcagctcagtgaaacctctgcctcctgggttcaagcaattctcctgcctcagctgggattacaggcatgtgccaccatgcctggctaatttttgcatttttagtagagatgttgtccaggctggtctcgaattcctgacctcaagtgatccacccaccttggcctcccaaagtgctgggattacaggtgtgagccactgtgcccagacagctgtataatctaatcttcttctaagatcccccagggagaggcataccagaatcctggaggagctgggtcccttttctctccctgcctctctagagagggttcagcctggtcaggtggacagccggctggaattggggctggttggctgggactttgtggtcacttaggtccagaaaagcagatcatggggacaggcaccagggttttaaggacatcgttaaatacctcacaagacagaccctggctgcatgtcttctaacccacgatggcctcagcttaacgagtcctaagaaagaactagccctccttaagtcattcctagagttcttcaatagcagccaaactatacacatgaaccaacccctccaaacagcatggctatgcagcaggtcagaagagaaaggcatgttggacttaccactgggctttggggggagctgcttcacctccctgggcctcggtttccccatgtatggaaagggccagtgatatggtctggatctgtgaccccaccacatctcatgttgaattgtaatccccagtgttggaggggaggcctggtgggaggtaattggatcacaggggtgatttatcatgaatggtttagcatcatctcttagtgctgttctcatgatagtgagcgagttctcccgagatctggttgtttaaaagtgcgtagcacctttccccctcactctcttgctcctactccagccatgtgatgtgcctgcttccccttcaccttccgccatgattgtaagtttcctgaggcctccccagccatgcttcctgtacagcctgcagcactgtacagtgagccaagatctctccacctcttttctgtataaattacccagtctcaggtatttctttatagcaatgcaagaatggactaatacagccagctcttcccaagccagcacattccagcaccccactccaaggaatccaagaattccagaccgaacccgggcttccaggtcattatgaaggtatattcatcaaggtgggagaatataatgtatgttattaaatagttgctagcttgatttacaccttttaggtatttagacatatgatacgtggatctctatttatcctcttcttctcagccctgaaaatgttaggggtgggccaagatatgtaatacacacacatgcataattttatataatatctatagtatatataacatatgattatatatattatataattataaataatagagtaacatgtatatcatcccagtctaattcgtgtatggatgtgtatacatacacacacacacacacacacacatacagatatatagtttatagtcagctattgccgtgtgacaaagacacacacaatttcagcggcatacagtgataagcacgaatttctcctgtgtctgtgggaggcttatgcaaccccactctgtgtatgtcactcgatggctccagtctccagctgcctggagcttattcttatggccacagcagaaactccaagtccagccacagaagcacactttaagcctctccgtaaagccactacctgctaactcccacttggtgaagccccgtatcagggtgtggagaagttatttctgccaaccacgaagctgtagcaagggtgtagttgtctctaggtactacagggcagggaaaaattggaatcaataatttaacccatcacacataccaaacagaggttccctaggaagaagaaaatgagattgtcagggtgtgggggattaatttgtaattagttctaattactaaaagaatcgatgttttaattttttacaaagtatctgtattcccatattctttctgtaataaagcaaaaatcagaagccctcaattctccccaattccagttaaaatcctaataaatacaattgttacgagttgattcctttggaagactgcctagccattttgaaaaataaattcttttttagatacagacctcaaaccataggcagaagttaattccaaaaggatgagagacctagatgtaaaaacagaactgtaaaaattcagagggcgataatattatgaaatatatcaagacgtttttcttttttgcacttccttgggtgaccttctagcttttcagccagaggctcgcattgcctagaggtggtggcagatggagggagggagacgaggatgagggagggagggaggagggaagggggaggaggagaagaagaagagagagaagacagggaagagaggagggagagaagggtgacagggagctggttgagggaggggacacagagcaggagacagaggccccatgtggatcaaaggagtgacaagggagggcccatgctcagtgatatgagaacagcaagaggcaacaaacaagatacaaaaggatacacacttccatcccattcatgtacaagtttaaaacctacacaagtgttaccattgtttatgaacatatcccaatgttgcaaaaagtataaaagggtgcacaggagggatacaactggctggggaggaagggaggggtttaatacatctgtatcatttcgtattgttttttaaagaggatctgaagcaaatattcaaaatggtttgttacatttgggtgtctgttacattattttttacgttgtgaaatgcatgcatgatggaggaaaggcaggctgtgaatcagtatgaataggttgatcccatactttaaaagcacatgtgtgagtgcctgtgtgcacatctgtgtgctcaggtgtgtgtgtaggtgtctttttacctatggttctgtgcatgtctgtgtctgtagattatgtgtgtgggtgtggtatgggtacgtgtgtgtctctttgtgtcgcttgtgtgtgcatgtgtctgcgtatctgtgcaactatatgtccgtgtctctgcatatttgttagtatgtgtgtccatgtctgtgtctgtgcaattgtgtctatagttatgtttctgtatgtttgtcattgactgtgtgtatttgcacgtgtgtgtgtgtgtaagtgtgttttgttttgttttgttttgttttttgagatgtagtctcactctgtcacccaggctggagtgcagtggagagatcttggctcactgcaacgtccacctcctgggttcaagcaattctcctgactcagcctccccagtagccaggattacaggtgtccgccaccatatccagctagtttttgtatctttagtagagacggggtttcattatgttggccaggctggtctcgaactcctgacctcaagttatctgccctcatcggccttccaaagtgctgggatcacaggtatcagccaccacaccgagccactgcatgtgtgtatctgtgtgggtctgtgtagttgtgtgtctgtgtgtgcctgcacacctgtgtgtttataaatagaaaaaaaactagatggacaaatgtcaaatcattgacacagttctttctgggaaggggagacagaggacttttgtttccctttcacacattttatggtgatacattattttttgatgatgatgatgatgtattctttatttatatttttaaatactttttaaaaagacagtacacggaggccgggcacagtggctcacacctgaaatcccagcactttgagaggctgaggcaggtgggtcacttgggctcaggagtttgagaccagcctggccaacatggtgaaaccccatctctactaaaaatacaaaaattagccaggtgtcatggcgcagacctgtaatcccagctactcaggaggctgaggcaggagaaacgcttgaacccgggaagtagaggttgcactgagctgagattgcaccactgccctccagcctgggggggagagtgagactctgtctcaaaaaataaaaataaaataaaagacagtacagagtttcacagcttgaaaaataagaatttaccagccgactctgcactctgctccagggctcctcccttgagccgcactttgctttgcctccggggcctggatcatccatcccacccatccacaagggccctggggacagaggagcctggggacacttcccggcccaaccccaggggcacagcccaaagcaatcatgacatttctctggagtcttgtattttatctttaaatgttaggcagagtttacgttctcccttgtaatgtatacatgtttgtcttgctgacttgtttgtcaattctggagtcaagggggcactcaaatggactccactgggcacttgtctgtaaacccagcactttgggaggagaaggcaggaggattgcttgaggtcaggtgtttgaaaccagcttgggcaacatagcaagaccccatctctctactaaagatttttttttttaagatggagatttgctcttgttgcccaggctgaagtgcaatggcacaatcttggctcactgcagcctctgtctcccaggttcaagcaattctcctgcctcagcctcccgagtagctgggattacaggcacatgccaccatgcccagctaactttttgtatttttagtagagacggggtttcaccacgttggccaggctggtctcaaacttttggtctcaggtgatccgcctgccttggcctcccaatatgctgggattataggcatgagacattgtgcctggtctactaaagatttttaaattggcccctgatgtagtggtgcacgcttattgtcccagctacttaggtggctgaagtgggaggattgcttcagcccaggagtttgaggctgcagggagctatcatcatgctgctgcactccaacctgggcaatggagtcagcctcatcctcttaaacaaacaaaaaaagtgaaaggggactctgctgtacgcgccttcctgtgctcctgtgcatctcttgtgggtgggctctgggcaacggtacctgaggggtggagctgaaaccatggcttgacgggaggcatgttggaagaggaaatcagccatcagctctaaacaacagctgctacttacagagcactcacactggctgggccgagttctttgctttgctgtgttctcccatttaattcttccagcaaccccacccgttaggtcctatctctgttcccacactacacaggaggacactgagactggagaggtaaagcccaaggtcaaccagctgcactcagattctcaagttgatgctctgcacagactgtctactacagggcaggcccaaggagaagggattgcctgtcacatggaaggggctccatgtactgggcttgggtccaaggaaggagagccctgggtttctgatggaacaaaggccactctcattgtctaaacttttttcatgggaaaaactcccttggacccttgcaaatgtatctgcagagcctcaggtggtcacttggagccagagtggcagccacacacagtcacttggggcaggattctatggaaagccattctcccacggatcccgtctgggcttatattgattgagaaaagtggaggactcccccgacccccctggagagggcctccctggcatcccttgactgcaacagcctaatctgttccaacaatcttctcagcgctgttgcacaagaagggctacgggtccctgggagtgctcttgaactttccccagtgtcaggccagctcagggttccgtgcttaaaacattcagcggcccagccctcaacacagaatccatcctctcctccccaacccccacccccccgccccactcccacccccagggaaagtctgactttgcccagtacccacttccctcccaggggttcagggcagcagtcccattggcttgtaacttggcatgtgacccagtttttgccaataggacgtgacaaggagggctgtgggagccactaggataattccattgttttctataggtgtccaggcaggtgtgaagctttgagctctgttcattttgagaccagagaagtgctggcatgagaacaggccaacgtgctgaggatggtagaggaaagctggggagagctggtccttgaatagtattccaatccactgattcacctccaggcgcattctgtgaatcaggtgttctatcatgaagctattctgttgcagcctttgctacttgcacccaaatccatatagcatttgagaatttgatggaaaaggctcaaatgcagttttgagcaatttagggggctgctggctcccccacaggctgcaaaaatgttaaaattcctggtcaggaggtcttagtcttgtctcgttctcaccccagtgctggctcccagggccggcagggttggtttggttcagaatggcacacccaggctgttggcagaaggtagaaaggcaacccctgccttcctgcccactaggagtcctgagtgcccactgagcgtggtgccagggactgggcaagggcaatttgggtgaggggacaggtgaggggactaacagtcccatgtttcgtcactccctttagtctccagattctctggggtcctaactaggagggaagattggggggattcccagggtagaggcggaggccaggtgggtgtgaccgtgagctctggtccaggctggcttattcctagcctgtacaggagccatctctggagcctgaggtgagcacagatctaagaaggactgaccagcaccccaggaagcctgggggtgggggaagagacaacccggtgctaaaaccccagtcctccctcccggagacagcagcaggcaggtctctcagtctgttcatctgcttgtctgattatagccttgctgagaaggttgggttcagcagagtctgtgatctcattttgggttcattttcccttccttattaagatcctaatttttaaacatagcctgcaaacagcaatagcaacaaagaacaacatcacattggaagccaccttgaaacatctggaaacctgaggtcttgccatgggttttacatcctgcaaatgccccgctgtgtgagagcacaggtttgaatctgctttttaaactatgaactgtaatgacttaagtgccagtcaactcttaatgatagagcaagttctgattggactcacgtccgatgtcatctcttgaaccacagtaatgaaacaggatgtactccacgagatgtttcaatatgttctcagtccaaattctacatctttcaattaaaaaatgcatcaccattgcattatataccacagatcattaaatacctatcactgtccatatccaagtctcccagtggaagagatggctgacatttagctaggaacttttaaaacacttgagaataaattatgacccaaacttactgttcttaatgacacgtataaagttcagctcttaaataaaaggattcaggaatacagaaacaaagtccccagccgtactaaggaaataaaagtcgtccagttcttgtttccactaaattgtacatttttattataattggtataaagtgaaactcttaaaaaaacacgtaggaatttaaaataaagtagaatatcctattttcagggtcaccagtaccatggtgagatttgtctcttaaacaatgacacttagtagctctgtagttccatgaatacttttgaagtgtcatattaaaaccaatctcatggccttgaggcaaagagaagcaattagtcttggagttgtgaataaataaaaatccatttatacacccgtccttgacatgtaccttgcaaatcttagaaacttcatctagtgggaaaataaatgttaaatcatgaatacccatactaatcacattgccatgtggcttcctaaaacagtttcgcttataccaatctttcaagtattaatttatatgtatatattcacccagattgaacacgaaacaaaggcgttaccgcagccacctaggatgagggacaaaagaggtgtgaggggcgctgggggccacaggagccatgacaagcggattttcagtgagtccctcatcctccaacacaagcctgctccaccttccctcattccaccctccacaaaggcctggggcgggggaggacgtttctgtccatgaagttgggggcacccacacacacaacctcgtccgattgtgattctagccagcatttaagggtggatacaggagatcaaagtatttgaatacttgcttcactttctatttgtgtctggtccctcaatgctgagtgggatgtgcattgatggagggctttgctgttcctatgtcgtgcttgggacagtcggccacaaagctgggctgacctctcgggccgggccgggcctggccagcgtgccgaacgcgcagagagcgcgctgctgagccgaagctgggagctggaagcccggaggtaccggggcgtagggagcagagtgggcagcccttgggcctcgcgggagcccctcccaacccctgcacagatccctgacctacttccagggcttctttctgttccaggagcagctcaaaatccataaattaaggaaattaactgatggggcctgcggcatctttgtaagctatttaaatctataaatttacaacatcttctgcatatatcaaataattgaactaactgcagggatgtaactttaatgagaaaatttccccctttttcctgtagttcgaactcgaaaataaataaataaataaaaccttcccttaggaggaaagtttcggctgattcccgcgtaaagaagttacggaagcgctgtctggacgctctctccacgcgcgcgaggtcctctagtagagggagaaagccccccccacttcaccttcctcccactggcaccccgagtccccctcaccccagctccaggccgaccccgagcgccccccaccccgggagtgcggccgctagggggcgtccaggcccggccggagccggcggtcgggacccaggcgccgttccggcccgtgcgcacccgccccgcggtcccagccggtctccggcccgggcgtccctggagccaggcgggggcgcagtgccggccagtcgcgcgctccgtttcctaggagccgggaaatggtcgccgaggaggaggaggaggcacgggcggggcgcaaaggaaacaggaggaagaggaaggggaggaggagtgggagtgggagaaaaggaggaaggggcggccgaagcggagactggggaggggcgtccggggcgcggacctcggccgcggggagtcttggctgccgccgtctccatcgcgccgcgcgcgtaaaggaaatggcgcgtctagccgcgagcggtcggcccggtgccccagcgcgtccctcccccgcggcggccgaccgcgtgtccgcagacgtcacgggagaggggcagcggggcagagaccctgggagggcggccagggagcgggggaggggcggcctggcccccggctccgctccagccccgaccgactggcagcccagtttcttcccaagtcccgcccccagccccgggcgccgcggcggcggctgctctcctctttgtaaccgaggagtcaagaaatgtgagaaacgtgccctgtgttacttatttgggagccgaaaatttatgcccagctgaaagcgcccggggaaatattacatcagatgaaatgacaatgattaaaatcagcctctcccccgccccctccccgagcccggaggaggcccgggcgccgcgtggccggccggcggggggcggggggctgggccgcggagggcgctggggcctgggcgcaccgctcccgggagggtcctggccgcggccccggcgggaaggcgcgggcttcgggagaggcgggtggggatcgcccggcgaaaggaggggaaacggcgcgtttttgtcgccaggcgcgggcgcgcggagctaattgcgactctaatcctctgccccgcggcgcagccgagccccgagccaggagtcgccgcgcgcgcccgttcgcgctgggtaatttggggccggatcgctgccctttacgtccgggctgggccgcggcgaggcgctggctaggggctggagtggggggctggttttctctccagcaatcgagggaggccgccggagagagaggagggaggagaggaggtgggagcggcgggagggcagccggagagcggcgcgaggaggaggcggcggcggcggaggcggcggccgcgaagaggggaggaggcgaggggagggtggggaggggaggccccggcgcgccgcgccgcgaggggccgcgtgaagcgggggccggggcgggaggggtgggtggggggagggttgggggcgagagagaaagtaactccaggacgagaccggagcgacccgcgcagcgagcataggcggcgaagctgcgcccggcgcccgagaccggcagctgcgtggggcgggggctgcgcccgagcccgatctgccggctccgaggtaagctcagcgcgggcggccaccgctcagagccgcgcaaccctgccccgaagtggctgcgataccgagaaagtcgcccggccagggtctggacctgggcgggggcggccgctttgtccctctgctgggcggcgggggctggcggcgcgggggtgcccagcacaaaggcctggtgcaagagtggggttgcccacgtgggctggtcctggccgcgggtggaccctccccacgcgggcggtctcggagcttcctgccgcgcggtgtgtgtgtgtgtgtgtgtgtgtgtgtgtgtgtgtgcgcgcgcgcgcgcgcgcgcttgtggaggtccccgcactctggcccctgttctgggccgagcgccctgcagagctggcgagtttccggggtcagaaacgggctcacgcaactggggcttcgggatgcacaagtcccggcttggcgcccaaaatcagagaaagtctccagtgggacagatgtgcgtcctctgacgcccaccccacgagtccgaaacctggcaggaggggctgtcgcgctggtggtggtcccgggcgcgcagggtttggggctgggagaggggccgcgatgggagggatcgccgcctgcagatccggttccccgctgcccgcccgcaccccctgacctggacgcgcgcacccggcacacactcgcaaacacacccgggggcggacccccgcctctgcagcgcctttctgtcttccggcggcccccacccgcgactgcagaaagataagcttcaagttttcgctccgtatctcaaatgtgcatgaaggaatttaactgcacgagtgaataacagcattagtttcaattaatttttttttaatcccggcaacaataaactttgagaacaaaagcgcttttacgtccttaattaggcgagcttcccatctgtggtctccaagtgtctgcctcttgatttaactttgtccccgccccgcctccgcggcaacccctcccagcccagccccgcgcttcgggtgccgcggccaccccgccccgcggcgcctccagccttggcccaagccctctcccgtcgcccctaagttcacaccggccggctggctccgcggcggaggcgggagggggggggtggggaggctggcgcgcaccaggtggcccgcctgcctctccggggccacccctgggacaattgtgcaggcccccaggactttcgccccgggccagcgccctgagtgcggagccgaggggagctcgagaggcgccttctgtttaccttttatggttaaaataacagcttagcaaagaagcgacttcagaagaagcgatttagtgaaatcgtctcaagctgccgcagctcagccagtttaatcacccccagagagccgaacaactgcgagcgcaatgggacacaaaatcattttgtgtgtaaatgagcgtggcattctgctcacttctctctgctcgggcgggcggggctcggcggcgggcgggcagggacccgggtctcccgccgcagctggagaagcgggtcactaccgggccagtttggaaacctgtgggccctcccgaccgctatcgctgaggcccctgcaacaggcgggccagggcgcactggggctgggtgctgggtttgatgctggtgctggtggaatgaacttgtatctctcactgcacccacttttgtgcttctgacttaagcagtggtctcggaaagagggtcgtggtcccgcacggatgcgcttgttgggagaaaccttggagattcacggcaaggcgtaaagcctggggcttccaacggtaagtttctggcttgccatgaacatcaggttgttcttgggagggaaaaggggctaagaacagagtggagcggcttctgtgatggaggcttggtgttcacgtcactttggaatagtgtcctggtattggggaaaacatcttgcagtccgctttgatagaatttcagccagaattccttcctgttcagtttatcctcagcgcgtcttcccttctgactcctcccccagcagagcctcctagggcaggataatccattcctgaggtctgttttggttctcagaactccttgagctaagtgacctggttttgtttttttaagcttgtagaactcaggaatgccaaaagcagtggattctgagtccacaggccccagtgagggtatatattaaacatcactgtctgcccattgcaacctcccaccccagttttatgtcaggaaacttgcccgggcactcagggagagcaaccttgcttacatttgcaggatttgattctggttggattaaaattggatattgaatttcaaggcacaaattttgatcccagagttttaatgggaaaaagcaatcccatgggtcccaagaatttcaagtggtttctctcttaaaggttaaaccttcgagagacgtccagggtaggtttgtggaagccagtgtctgtggatgtgtgaaggggggtgactattcacgtgcaaatctcctctttcctcccttttgagacagctgtaaatcagtgaacggggctgcagaattctgcccctcctgcatagggcctgcaaagcgcccctgggtgtggcttccagggactgagggacaatcttatttcaggtgactacggcacagaggagagttactgagtgcctctggggaggagcagtagaaagggtccattggctgatctgcttgctctgtgcttcctcctggccacctggccatctcctgatgcctcgggggtatgtgatcctgaggggtctggaatgcattaggcatagacaacaccactctgggagtctggggagaaactgtgaggtacagactaggcaaacaaagacaggttttctctgctattgggagccacagagaagaggcggcttcccaagtgacttgccctcatccatgtgcctggacttctgctgaacggcttccctgtgtctggccagatgcaagctgtatcttatcaccatggggatggtattaagagaggtcctaggttccctggcccatggagggtgaggggtgctttctgagccttggtccacaaggctgttgcaagaggagacacgcttggtaacatggcttgaaaggaaaataccaggaaaatctggtttgttctgaaatattttggggcaataatggtgagcatatgtttcagtgctgtcattagccgaattagcagacatggagctgcccagaaaacacatgtgtgagtgtgactgtgtgtgtgtgcatgtatgtgtgtgtcatctgctacagcctggaggcctgctttggggtgtggagacagatagagagatagtggcggtggagtcaatcagggagggctgcatggacctcgcagggtctcagagagcatgcagaaaggacaattctaagtgtctttgaccccatggtacatgactaggaggaataagccttctctggttttgtcgatgcctcccgcagatactctgggcagggatggaagcctagatgcctcaccgcaaggagcggccgagcgggtcctcgcttcacacacacggcagcaccggcaccgcggtgagcctgcagggtgggctgggtccctgccgggagttccctctttcccttcttccccagtgcctgtttactggctgtccttccttgggaccatgacactccaggtggctgttgactggctgtaggattatgtatttttgaaacaaaaatgctcttaatttgatgtgaaatttactacatgtataaaactcaacgccttaggtgctgaggaagtcactaatttagaggtgtctcgttactgagacaaacttgcaaaaaacccctgaatcccaattcacaaattggtgattcgtttgtcaggggatatttcacatctaacacataagcccacgacctttaattagaattttgcagtttgttttatgcccctggaggctgacaccttgaaaaattttttttcttgatttcttattgctaataagcatctttctttttccctctggtactttgaagaaaatgatgcaaatacacttaattacagtggtggccataatttgtcagctgaatatatgatcaggcacgggcagaagtgatctgattagatctgtgatcacactctcaataaagggagtgcatggctgtgttgtggagaaactcttgtgttccgctttgaaactcttgtgttccgctttgtttccatctctaggagggaggaaacatgtcccggctgtctctcacccggtcgcctgtgtctcccctggctgcccagggcatccccctgccagcccagctcaccaagtccaatgcacctgtgcacatcgatgtgggcggccacatgtacaccagcagcctggccacgctcaccaagtaccctgactccaggtaagagtaagccccttgaaacatcaggcatgtgtgggtcagggcagcatctgtaatctgctgcctagggggtggggtctctccccactgtcactccacccaccagggtctccagggtgcacaagctgacacagcctgagggagctagggttggggagtccaagtctgcctgttgaaagctgctatgcacagaggcttgtgaccctgacttggcggcattggtagtgcaaggtggagctcctgacccacctgcaggggactagggcttattcagagccagcccagcctgagcctgccggcagcgggcaggggagtctcacgtaccttcaaggttcctctggagggagacttaggcccggcccctgcagggggtcatttgtgagtgatactgagtaggtaagtcttgggggcatgggggtgggtatttaatcctattttctattccacccctgggaaattcacaaggggagggaagaggagctgtggtgagctgcagtgtgccatctttgtcattttccgtggccactgctgggccctagaggctagcagcaggcttcccttggagctggtgctgcagtgactagctaggaatgaatcacatacctcatcagtggataaagggtctctggccaggaccctggttgggggctcacaggcaccctccatgctgctgaacttataggctgcccaggcccttgggcctgcgagaggtttggggtgctgggtgctgccagctctcctgctcttccttgcagggtgtttctctcctgggtgagggacctgctttccccgttggcacggcagcagggctgacccgagtagggtgggtcttgagcagcttgctcagccgaggatgtttgctcctggcacagagaggcggtcatcgctcccctggggctgctgaaggctgagcgtgggagggccaaggctgtgggcatcacccctgtgttatgcatttgaaataacaggaggagttaattaatcccccagatactgagggatcatctctggggagcatacacggcaggctgcattgtcaccggtgtggttcctcagagcagggaggatggtagtgcgcagaggtggctttccaagcctgttggggctgcaggggagcctgtgcaggtgcaggcatggtcccttgaggaggaaaaactggaaatgggtgcagtgtctagttccaaatttggagagtctagggtacagatggtgactggtgttccagtaccccaggtggacagagactcagcctggggccctgtggccttggggcttgtggggtggggacaagagccacggggccaggtcagcagtgttggcctgtgtgctcactcacagagccctgtctaggatgggagatagattctgcttatttaatttccattttgccttctgcggcatttctgagttgtttgagatagatcatcccttaatcggttgacgacgtttgtgagtgaaattcataaaacctttgcccacaaccctctctgaagagtttcctgaaatcagagagttgcctgtctggagtaatcacagcccaggccctgggggaggcgggtgggagaggcttctcattctgggctcttggctgctgcctgagagcaggagggcagggggccatctccccccacccagccccactgtgctgctcacccattgctttgttctgctgtgggatgtgctctcatggggagctagggcccctgtggccctgtgatctggcacttgggaccctcctggtgtgcccaaggggtggcagtctatgtttattcttccccagggctggggctcaaggtgaatctgttgttctgcctggatggcctctggctgctgtgggggtgctctgtaggcctgaagctttggactagaggccagggatggctgacctgcaggacaatcaggggacaggaggccagggggcctgagaagtgggtcaggcagctgtgctggcaagagcccctcagatctctcttgtccttcctgtagtggattattataatataagcagttttctaccaattctggaaaaaatcaatctcacctagtgtcactgatctaggagacacctggagatggaggactaagagtgctgtggtcctcagggggtttctggatggtgaagatgacctgccctaggcagcattgtaaaagctgggacctctaccctcggctcccctgagaactctgcctgagcctctgggtctcggcggttggggtggcctgggtgctggagagtctcgtgctgggtgactcctctggtctgcctaggagcagtcactggtcctcacccgagacagccaagcacagccggggctgggagtggattccctgggccggcccccttgctggtgtcctgcctgcttgacccccgttagctgccgccatcacagccacactctgacatccatcctgactatgggaagcatcaaatgaagatggccaggagcttcagaactcttaaaacctggtgcctgaaacagccaggaaattggagccagagcttaaaaaaaaaaaggaaataaacgagaagacgaaggccatcctgatgctcccccttgtgcacacagggcaggtggttggaggcatcttttctgcccctgagggtcccacctgctgcagcgtgaactggccacctcattccatggaggacttcggaagccggcccctcaaaccctgcatcctctctcagagggtggcctgggccattttccacagggaacgtggagcccctgacagagctgggaactcatacctgcagggctgagaatggctgagggctcctccatggtgattatcctcacctttcctcaacctgctcacgtccttggcagcctcagacgctgagggcatgaaaggcctctgtcctgggagaggcggtacagctgccgcttgatccaggagcctatactgaaccatggaaagatctagaatcagcctgtcctgaaataaggcagatggaaaaccttctaaacttggaccgatgagacaacctagaacccatccagccctggaatgtgggtgcatcaggagtcttctagaccaacaggaccagctagagcctcagccagacctgacgtcagaagggttgggaactcagccaggcctagaatgctgcctgcttacatggactttggagctccactgggaagggtggggagagttcccaggaggctgagggtttggatctgctgactcaccttggatgtagctcttacttcccaccggtgccacacatggacctcagccacctgccaaccactgcccatggtatctggcagcctgggacagacccatctgtctccaggaatgctgggtggccctcactctgacatctggatgcccacgctctactaggccaggtcctagggcctttgtaactggagccagccgtggaacccacagcctttccagcaggggctgtgacctgcagtgccattgtcaccaggcctagggggttgacagggctcatcggcctttggagctctgagatgagttgtatctgggtggctgcagctctgggtccacagactcgggctcacagcagactctgacctccccatgcccatccacgagacagccttgcccttttctttctttcttttaagcgacagcgtttgtctttcttggccaggctggagtacgtggtgtgatctcggctcattgcaacctcaaacgcatggactcaagtgatcctcccacctcagcctcccaagtggactacaagtgcatgccaccatacccagctaatttttaaattttttgtagagatggggtcttgctgcgttgcctaggctggtctcgaacccctggcctcaagcagtcctccaccttagcttcccaaagtgctgggattacaggtgtgagccacggtgcccagctaaaccgtgccctttatactaccctgctaggagagaaacctgcaccgtgttcccagagactccatacccgggcagaccatcatggctgatgcattgagtgtgctgggccatcagagcataggatggtgtggacgggaggccctgagggcagacttgggggctctgactccctcagctcctgcccagctagtgtgtcctgggtgcaagtggcagtggggcagggccctggagacggctgacttggagtggacagaggagtgggctgctgttagaacagggggcatccctgcaggggtccctgctggtgcaggcagagagtgaggggcttaggctccagattgtgtgcaggccgggctgggaagcctaggtcccaagttggagctactgttctcccagctgtgcagagaagctgccaccttggcagggtccagctgggcaggagtgtggccctgcctgctgaaggatgtggtggtgctgcccttggggaaatgatgccaacttccctcctgttcccaaaccaagcccttggctactcccacccctctttagggttcctagttatccctagctcgacctggggtctgccagggcagttgccaaaccagagctggccaccctgggcactggggaggtggtatcagccctggctctgaggcctggctccttctccccggagtggacagggacaggcatcaggggctccccaagacccttctcctggtcttgcatttgttagaaccattgcccttcagaggacagggtaccggcacctgccttctctccagtccccatccgccaccactaggtgtggtgtgcatacgctctggcatgtgtgcacatatgtatgcactgtggtgcatgtgtgtgcatggtttctgtgtgcgtgtgtgtatgcctgtgttgtggcatgtgtgcaagggccctgttgcatgtgtgtgctgtggcacacttgccatccctcctgtctgcctctgtttctccctgtgggctccctgagtgagcggcagtaggggatttgtgccgtcatgtctctgggtgcctggtgttgacaggtgtgtgtcctttcctggatgtgtctggatctgcatgatatgtgtgtgttgggaaggaagggaccatgtgaccctgtgcctgttgcacaggcctgtgtgtctcacactcgtttacatgggttgggtggggaggatgtatgtcctggctcgtttactgggtgtgtggctgttggccggggtgttggatggttcatgtgcattttctgggtgggtctatctggcaagggtgtgtgcaccaggcctgtgaccagctggtttgtgtgtagggggtaaggtgcctgtgtcttgctatacctttccaggcctgtaacataacgtgtgttggcaggctggtgtgtacagctgggtgtgtccctctctggctgtgacttgcgggtgtaggcaggatgtgtggtgtgtcctgttaactgtagcctggctgccccaggtgtgtgcagatgttgtcaggcctggaacagttccagagtcacccatgtcaggtccctcgcccctccagccgtgtgggccctcaggagtgggggcggggtgtgggaagacaggcagacttgtccccatcccttcagacatcccacctcgcctgtctctcccaggataagccgcctcttcaatggcactgaacccatcgtcctggacagtttgaagcaacattatttcattgaccgggatggggagattttccgctacgtcctgagcttcctgcggacgtccaagctgctgcttccggatgactttaaggtaagtccatggctggtggcccccctgcactgcctgtgtgatggcattacacaggggacgctgtgacttaataagtggacccctggttgtcatggtaaccataaaaagttaaacgatgaagccgagggctaaatcagtttttctaaactaattttgttttctcacatttttagcttatttatcagggtatataacaacaatcaagctgcagaacgtatcccagctgaacatttgtcgtgtttaaggatgggcgcgtgccagcgttatagtagttagaggttcataaatctgttccatcggctgggtgcagtggttcatgcctgtaatcccagcactttgggaggccaaggtgggtggatcacttgaggtcaggagttcaagaccaacttggccaacttgatgaaaccccatctctactgaaaatgcaaaaattaggcctggagcggtggctcacgcctgtaatcccagcactttgggaggccgaggcgggtggatcaccaggtcaggagtttgagaccagcctggccaagatggtgaaacaccgtctctgctaaaaatagaaaaattagccaggcgtggtggcaggcctgtaatcccagctactcgggaggctgagacaggagaaccacttgaacccaggaggcagaggttacagtgggccgagattgcgccactgcactctagcctgggcgacagagcaagactccgtctcaaaaaagagaaagaaaaggacggctgtaattagacttcaaaaaataaagtataaaaagaaaaatgcaaaaattagccgggcatggtgacaggtgcctgtaataccagccacttgggaagctgaggcaggagaatctcttgaacccaggaggtggaggcggaggttgcagtgagccgagatcacgtcactgcactccagcctggatgacggagcaagactctgtctcaaaaaaaaaaaaaaatctgttctgtgttgggcaatttgcagggagaaaagccctgatgaccaaacagataccctttaaacaaaaggttaacccccaggtctccgggtgagcccgtcagggcaggtgacctggttccctgggtcatgcctcagtgctgagcccctcccacatgtcagggactctgggaggaaggaaactcaggcctggggtacactggcatgtattaatactagcaaatgtctgtccttccttccttcattccttcctctatccagaggaccagtagccctggggccttgtctttcatccagctcagttactgagtgccagcctctgaattcaggctgaaaacagtgaaacacacacactaggacctgccccacaacacttaacagtctagcgggcagacagatactgaacttgaagtccatgtgacctgggctgggcgggtttgaaagaaatgatgttcatctgggtggtgaaggcagaacggggccaaacaggtgtgagggccttggtgcaggggatgggggtggcagatggcttgatgcattccagaactggaaagaaggtgtcaagcctggagctttatggactgggaggggaaggtcaggaaaggaggctgctgtttgatgtcaggaccttggtgggtggcccagtgcctggcatttaactctgaatgcagtggaaggggtgtgtgcaggggaagggcagtcagatctgcaaattgggaagatctctctggctgttgggtggggaagaaggcagagaggggtgggggtgggtgcagtgaggcaattatggatgaggccccttccccaggccaagggaggctgggtggaggctttggatggaccaggatggagatagagaagatggagcaaggtggcacatcagacttctgtttagtacaggcacagtggctcacttggtcatcccagcactttgggaggccgaatggggaggatcctttgaggcctggagttcaagaccagcctggacaacatagcaagatgctgtctatacaaatttgttttttaattaaaaaaggccgggtgcggtggctcacacctgtaattctagcgctttgggaggccgatttaggtggatcacctgaggtcaggagttcgagaccagcctgaccaatatggtgaaaccccatctctcttaaaaatacaaaaatgagccgggcgtggtggtgtgcacctgtagtcccagctactcgggagactgagacaggagaattgcttgaacccaggaggtggatgttgcagtgagctgaggtcacaccactgcactccagcctgggcaacagagcaaggtttcataagtaaataaataaactttacttttaaagttttttaagagtaatttatttacttttcataagtaaataaataaacaagcaagcaagctgcaaaagcacgtggctgtggtagtgtaaagggcctcttgcaggtgccccgggacttgtggcttgaattctgagttggtaagttgaggcccggggtggaccaggctgtgggagtggggtttctgcccctgcatgggagagctggtggggcatcagatggagaaatcctgggccatgacaaaagatggggttgtctgtcatgcagttgtcatttaaaatctcaggagaatggccaggagaggtggctcacacctgtaatcccagtgctttgggaggccaagcaggaggatcatttgatcccaggaattccagaccagcctggaccttgtgtctacaaataattattattgttattattattattatcctggcatgatggctcatgcctgtagtctcagctgctcgggaggctgagtcaggaggatcccttgagcctgggagttcaaggctgcagtgagctatgatcacatcactgcactccagtctgggctacagaatgagaccctgtctaaagaaaataaaataaaaatctcaggagcaagtgagagtggagagagcagaggcccaggatagagccctgaggagcccttgcatggggcaggagaggcaggatgggccactgacccatgacaggcccagaggtcagggttagaatctaggcctccctccaggcggccagcaggtggaagggacttagggcctgtaggtcagggggctgggcttccttgcctcttcctcaggcatgagtcatggggacctatgggaccttggccattcccagtggggtgggtgtgtgtgagcgtgtatagtgtgcatatgtggcccagggcatggggccagtatcagcgcctgagggacagtctgtgcgaggctgcttagcccagaagggggctgcgtggcagggggcgggcttcccctccctggacactttatcacactctgcctgtttgggcaggggctggaccaggcacttggcacatcttgcatcctttgatcctcactttcattctctgagctggttgtttatgtccattttatacataagggaactgaggccgggcgcagtggctcacgccttgggaggccgaggcaggtggatcacatgagggcaggagttcaagaccagcctggccaacatgggaaaaccccatctctactaaaaacataaaagttagccgggtgtggtggcaggcacctgtagtcccagctactcgggaggctgaggcacgagaattgtggagtttgctgtgagccaaaatcgagccactgcactccagcctgggtgacagagagagtctgtctcaaaaaacaaaaacaaaaaaaaaaaacaaaaaaaaacgaaaaaaaaaccaagaggctcagttagtgaggtatagaggtttagaggtctcagggcaggttgatgatgaagctgaaaatctgacccaggcaggcttggctggagaagaactttttttgcttccgggtaggctgtgagctcctaggcccggctgccctgtgcccagcatgatctcttctctcggtgggattctaaggcagcagcaggtccccaggcataggcacagcctcgtcctttagtggagcttccaggtctttccatggggaggcttcactgcccagtgcctggggccagatggaagggctcaggggggctggcacaggtgcacatcagcggctgcccttgggacaaggctaggttctttatacttgcaaaccactcagttgccccatctgtacaatgggtgcaaccggcccagtccacacaataccctgcgagtcgcagttcctgcagaattggttggaaccggcaggccgcctcccctctcccccttcccccaccacccctactccgacacccacatcaacaccctgtgcgcctgtccccaggacttcagtctgctgtacgaggaggcgcgctactatcagctccagcccatggtgcgcgagctggagcgctggcagcaggagcaggagcagcggcgccgcagccgggcctgtgactgcctggtggtgcgcgtcacgcccgacttgggcgagcggatcgcactcagcggcgagaaggccctcatcgaggaggtcttccccgagaccggagacgtcatgtgcaactccgtcaacgccggctggaaccaggaccccacgcacgtcatccgcttcccgctcaatggctactgccggctcaactcggtacaggtgagggctgcacgctgccccctccccgccgcacccccggcgtccgcggagccctccaggggcagagtgagctggagggaggcgcgatccctgaaacggtgaagccccccgtgccatcctacaaaaaaggcaacaatgtgtcgatgcataatttatgtccctctcataattaaatgatggcgcctgggggatggacttaaaaaaatcgatctgtactttttttttttttttccaaaaggatgttctataaaaatggcccagagtattttcaacaaagcgtgcttcatttgacacccagagtctgactttggattcgaactaaacccaggcaacaggcgaggcaggacagaggctgagtggaaaggtggtctggagccccttccctctccctgctgacctgggagtcgcaggcacccaccagctgccaagagaatccctggaccggctcttcctggatgggtccaagaattggacagctcagatggagtgagggcctattttccaacagctcttcgcagacccaagagcttggcacatttccgggttagggtggaatgggctttgcagggaagagggccccctgtgcacgcattccacagcctgtcggtcagaacttgctagttgcaggagacgggtgttacacgcagtcatcagacctcaccctcacagaggcacaaacccacatagttgtggacgcctgcagagactcaaatattgagaggacttctcctttttctctccctccagagctcccacgagctgatgcacccccaggcttcaaaccacctggaatgcacagctcagggaagctggtggatgcctagaggctgaaggacagggaactctccattattggggcaggactcagggaggacacttggggccatgtgtctggagagagggcataggttacaccctacagaataaagaagggacccaaagcctctttttgcctcccggaatcaaggccctgagggcagcaggatggtggcctgggtggggtcgtccaactaggtttgctaacctgaggggtcactgggcctggccacttctgtccctctggtggtggaacccagcacgtggttctgtagggacctttgtcagtgagcaagactgagatcgtcacaggagaaggtgcccttgctggctgccccagcaggcacccacctccctgccaggccaagccaggtgtcctcttgcagcttggccttgatgacctctgtttcttcctgggcaggtcctggagcggctgttccagaggggtttcagcgtggctgcgtcctgtgggggcggtgtggactcctcccagttcagcgagtatgtgctttgccgggaggagcggcggccgcagcccacccccactgctgttcgaatcaagcaggaacccctggactaggccctgcttcagtgcccacctgggcccccccagggacctggaaacagtgctggggagttctgcctgtgtatacttggccgtgggcatgagaccgagggtgaggctggagggtccaaagctggcccagcgagcaccagggtcccaggtgtcatggcaacagaacgtgggatgctggaggcatgcctgcagaaggactgttgatgcgacccaaagatacagcggtgggatctctgctgccagctctcccagcccctcagcttcgcagcctggcgcagcatcctctgaggccccggggcctgttggggcggggttggaagagccgtctgcagctacttcagaggagctgtttatccctctccacgcggggcagactctggcgggtctcctagcgtccgagagatggcttattttctacagtatttaaaatggatgcagccctaactgcaaaagtcagagaggctgacaaggaccaatgcttctttatctggtgctcagttctcagtcagacgtgcagcatggctgcagggtggaccagctgcctggcattcaggcccagatgcctgcagggctggggctctcgggacagatgcagggatgtgtgctgcagggctgctgggaggagagtggtgggggcctgagggctgagtgattctgtaaccacctgagaccttcacgtttgctgccgttgggggctcaggctgcactccccgggtcacctgacctgctgcccaggggcttccagtcctgtctgtgtggactggcacctgggctgctggagaagtctcctcccgttcggaccagcctcagggctgcacgttacctcaggaatgggccccaccatgaaggggcccatctgtcagcagcgtcttctaggtccccagctcagggagccatccccagctccagttttctcatgcgaatatgcacagttttaattcacgttgttacactagcctgccgatgagacccagacacaggcagacctggcgctcttgacccctgattccagtgaggactggccctgaggagtccttgcagacctgctgcctcccccacgacaggcccaaagatggaccccccctggccttgtgacagctccccaagtgttctccggtggagaaactgcagaggactggtgggcggggctccccagccatcaccatcctgtgtacaatggctgtagacttgtatatggctcctttaatattgtaaagatgctgatgtacaattgtcgtgcatttgtgtgaacacattgcgttcccagtccatgccataaatgatgctctcaagcaaaagactggaggctctgtcctgtgcagaagcagcagccagactcccgcattcgatgttgtgcagggaggtttgggggcggaacggattcctcccttggatccttcagttcccatcgaggaataacccgcagcagtggtggaggaaggtcagtggctgggtcctgagcttggtgttatttattgcatttgggtgcctgtcccctcagggcagcacagattctgaattctgattcacagtccctagccagatgggaactgggaaagagacagaaggcgtctgggtgcttttgaaccctgtctcaaatgtttgggattttctctctcactattctttggttggggatgatgtcctctttagacccccacgtaatggtatgagaaggtggcaggcagtggctcagccagccagggggcaccaagtcatgcagccagcgtgagacctgcagttcacctaagcacagaacgagatctcagtatgcctccatgtaaacagattcacataggcctccaatttcaatgagaccttttgcattttttctcaaagcccttatgttctaacccatgagaaccattttacctgccctctaagggccaccagcttcgacctgcctcaggggacagcagcacagaccagtggctccctgtccaaggccgcagagcagacgccatcccactgtacaatcgaatttgctggacaaacttgataggtttctctgcttagcaacgagcctatagttagttggcacatctgcgttttggcatctgaggctcccatctgagtggaggagaaagtgttgtgtttattagcaggaagtcttgtgaaaacagctcgctgctgtgtatgtttatggatttttctgatataacagccagcatggttaccgagtggtagagattctcgaacattctcaaactctctttttgggtaaatgattgtgctaaaaataaaatttattaataaagaaggggaaaaaggagtaactctacctgactaaatgttactctaatttatttatttctttactaattaagtaaaaccaggaagtatgattttacatcaaccagagaatttctgaatttatagggaaacactatgtccccataatgatgctataattctaatatatctagtccccataaacagtaagtacaaattatcattcctttaaagcatttttacacttcctggaatgagtatattatcagcaatcttttgtcaaatgccagccgtataaatgttacttctgctctttgtaaacctcaaaactcattattcttgattataagcaactggacagaaccatgccaaagcttccccgtttcccaccaaacccctgccagtgagtgcagagaactcgcaaagccacagcaggcggtctcagccaccgtcccgctcacaggggcccaatgccaggtcacaacactaagaatatctttcaaaaaatgtgtcttttttttttttttttttaaagctactgcttgactgttccttagaataaataaaggatattttataaattacagctctagcccttggtttgtaattcacggaagcagccacaatcaggtactccagcattggtcctcgggaaccaccactccccacacttgggacctggtgtggctactgagtaggaccttaacatcccaagtcccaaatcccaaagcttcctgatttgaggactgaccagagagcagcagcgttgtctctaggcgctcagtgcacatgctgttggcagatctggcggggaaaatggtgcaggcatggcctccctttacctctccagacccccaagcctggactcaagtgttcaggctgtgatgagcatgttgcactacgttggtgttgcatacatgtatatctgtggaccaaaccactaacattcaaaagaaggaaagtgggcgggtcacagtgactcatgcctgtaatcccaacactttgggaggctgaggcgggtggattgctccagcacaggagttcaaaacgagcctgggcaatttggtgagaccccatctctacaaaagaatttaaaaataagccactcatggtggcatgtgcctatagtcccagctactcaggaggctgaggtgggaggatcacttgagttcaggaggttgaggctgcagtgagccatgttcacaccactgcactccagcctagacaacagagcaagccccgtctcaaaataaataaaattaaaaagagaaagcatggctgggtgtggtggctcacacctgtaatgccagcactttggggccaaggtgggtggatcccctgaggtcatgagttcaagaccagcctggccaacatggcaaaaccccgtctctactaaaaatacaaaaaaaaaaggattagctgggtgtgctggcatgtgcctgtagtcccagctactcgggaggctggggcacgagaatcgcttgaacccgggaggcagaagtcgcagtgagccgagatcgcaccactgcactctagcctggcgacagagcgaggctccatcttaaaataaaaaaataattaattaaaaaaaaagggaagcacagatgtgagaaatggggaaactatatccattgagccactgaccaagataatatttaacttgactaagcctagcagagcctgcccacttcccctccctagaggccaacccatgttctcgaggcaatgctgtctgccaagatggccccatcccatcaagccctgccttccctcctgattctccagagacaggaaaatggctgcattggccctggaagatactcaatttctcctaagtagatgacaaggtggaaaatacaaaaatgggaaactgccaggggatattcagttggaggcaggaaatctgcctcagttcaaaacaatagggaggtctagacagagctagagggacaactgatggccagagaaggcagccgctggcctggatggagtctgacatctgggctgatgtagctgttgtaggaagtaggatgtcacaggttgatggccatctcaaggggggtaggcaatgtgtttagccacaaggctcaagtcagccaagtaatattggtcttgtcacatgtgtgatgagaatgtgggtggctctctttgctcaccccaaccccgcccaaaggaggagtttccttgtagagagagggcttgccctcacctggagatcaggggctggcagctgtcttatctctgatggaagatttgatgtggagttacctgcactgaagagtctgggtcactgtatagggtaaaagcccacatcgttaactgccacaaattttaaaattttctacaaatggatttgcttagaatgaatggtaagaaaagggtcaggtgcagtggcacacacctgtaatcccagcactttgggaggccaaggtgggtggatcattttaggtcaggagttcgagaccagcctggccaacatggtgaaaccctgtctctactaaaaatacaaaaattagccaggcatggcggtgcgtgcctgtagttccagctactcgggagcctgaggcaggagaatcgcttgaacctgggaggcagaggttgcagtgagccgaagtctcaccactgcactccagcctgggtgacagagtgagactccttctcaaaaacaggaaaaaaaaatggtaagaatagaaagatgatattaatgcatatgtgtcaaaagcagctcctgcctttattagtgagaagtttctcattagatcaaatgaagtttcttgtcagtatccagagaaacctacaaaggcatcacaaagataaagctctaacgtccaacataaagcccgagacaaaagatggtctagagcacctgcttggaggaaggtctatccaggaacaactgtatttaggttaaactgctaaattcaccaactagggcagagaggcacagaaacattccctccagaacccctttccattaagagttcactcctgtcaccacattctaggcagccccgatgttctctggaggaccggtgaggtaaggtaatgctttgtggactaacagaaagaaaaaagtgttggtgacagctaagggcagcttcctgccagcaccaagactagcgctgatgttctcttagaagcaccagagttttctaaggtgacccaaatggaacacaaccccagggaaggttgaaagtcagaaaagaagagcgcgtctctgctctttctggatctcacaaccagcgagttctcgcagccatggcctctgtaagcccagggacatttctctgtgagctttcattggaagggaaaccccagccccagagaagcctaccccgccacatcccaggctaatccctggatctggttcaggagctctcttcctgcaagccccaaagctagacaagcagagccctgccaggcccatggtgacctctgcagacctaggaactgcaggcagagttgggggctcgttcctggggaggggcccacccctgaggttgtgcatccaggaggggcccacccctgaggttgtgcatccaggcatgactgactgttggtagctgtttaccctcagggaaagagaactttctgtgtttttatctccacccccagtggaaggatatgttgagtagagtttttgctttttgaggaaaagtcatgatttggaaaggggcgctgatgtatctgttgaggctttggatgttgatttttaaagggtccctgcttccctgcaaagatccttatcttcacaaccacccaagagcaccacttattggtggccagcatatgccaagcactgcaggtgcttgggagggcaagatagctcatgaggcttggagcagacatttgtttatgcacaggaattgttcactttttttcttctcctttttttttttttttgtgagacagggtctcactccgttgcccaggctggagtgcagtggtgcagtcttggcttactgcaacctctgcctcctgggttcaagcgattcttgtgcctcagtctcccgagtagctgggattacaggtgtgcaccaccacgcccagctaattactgtatttttagtagaggcggggttttgctttgttggccaggctggtcttgaactcctggcctcaagtgatcctcccaccttggcctcccaaaatgctgggattacaggtgtgagccattgcgcccagccaggaattgtttactttcaattgtgtacttgaagctctgtaaatttaacaggaagagagaccacattgcagttttccacttcgtcatgacactgaacatggattaccccaaatgcattgatttgcatgtagagagaaccacctctcaggcctcaagactagcgtctccatagcaaaggaagcttctgtgaaattctaatgagagacccagagaaagaggcaggcacactcccggggacacacaaaggagaggggttaggggtcagctgcatttggggttttgtctttatttccattacacagaacagccagtcccgacagcgcccaggccccacaggacaatgctgttcctggacccggagccatggccgtggaataagagctaggtcttcagggcctcctcctaggatccttcttaacacagaaatcacaaaccaggccaaagtcttaaaaagcagagcctgggaggggcagggacgcccaagccacgctggggcccgggaggcctcccgtcctgcccgcgggagaacccaggccgcgcatccctggctggacggcgtcaccagccgtagctgggccaggcctgctgctcaaagcccgtgtctaggatgtcaccagagctcccttttctgtgtcctggacccggttcagggcccccgaggaagctgcggtttggggcgagccgattgcaccagcagggccgggctgctgctcccggggctgacgcgggccacgccctcctggacgcggacacacccccatttccccgggcccacagagccacgcctggccctgcagccaaacagcgggaaggcagattggtacgagtaggtacaaggccctggaattctcgcccggttgccacacactgcacggagcataattgggggaggttgtgcaactgcccgggaagccggggctcgcaacgagggctctctccaagtccccatcacaggcctccggggagcctcgggacagagcctgacgccaccttcgggtgacatcgatggcctcgctctggcagaggagtagtgtggctctgccgagaactggggagcccgggtccccgcagggccaaggggagggagggctggcggaaggggccgcgcccacagccccaggtggcagcagcggcggtggcggtcccgactggcagagcctaacgagaacagggcctatccccaggggccccgggctggacgcagaccagatctcgcgggggtgggctgggaggcgcccgccagaggccggaggctgacagtgcctttcctatcctatgggtctattgtgggcccgcggagcccccatgggtgggtccatccccgggcccagtgagtcacttccccaggccccggaggccttcgtggaaggtgcctccctttccggcaaagcatcctttgttctcctgctggctttgcttcccaatcctctctgagttgcaaccttgagggttttaggggcaccaagctcccaggagcacagaggtgggcttgggtgccacctggagagcgggctgcagaaggctgcagctgcttttttgcttcctcagttccctgccctctcaaggcccaggctctcccacctccccagacgtctggggaaacccacactgccctgcataggttgtggtgtgcagcctccggactgcagatcctgaacgcgcatcaggagggagggagggaggtttcgatgctctcgccctggccagcaccgctctgagttgctgaactggcctcaaggcttctcttgcatcagggagaggcttccggcaccaccactggcactcctccttctccctccctttagcctcccccagttcccatgcccaggtggaggaacccgtgtagaagcccagcccagggagggaattcatcaaagcaccttcccacacagcctctagtttgcctcctctccactcccaccttccagccccagcctggctagccacgtggggggctcctgtgccaaggagtgcccagctgccgggtgagtgagcagccctgcacagaaggcagctgactaccatacacactacatgtgtggagagcaccagccttgcagcctggcgaggctcttgctttgaagaaatagaagactaattattttatttatttatttatttatttatttatttatttatttatttatttttgagatggagtcttgctctgccacccaggctggagtgcattggtgtgatcttggctcactgcaacctccacctcccaggttcaagtgattctcctgcctcagcctcccgagtagctgggattacaggcgcccacaaccacgcctagttaatttttgtgtttttagtatatgtgctgctgaagtgagcatgaatttttgtgtttttagtacagatggggtttcaccatgttggacaggctggtcttgaactcctgacctcaagtgatctaccctccttggcttcccaaagtgctgagattacaggtgtgaaccacggcacccagccagaaaactaatttcaaaacaaaaacaaaagcacccctgtatgcacagattctcaaattgtatttactattggcaaagaaaggaagggggccccttagtgtcctaaaaccaggagagatgaaatcgattatggaacatcagttgatgaaatacatttatccttccacaaatatctactgagtgtctacaatcagcctggttactggaggccaggctctgagtcgtgagtgtcccatgaatcaccagctctccaaaccctgacatctaacaccacccacttcccaccctccccaggaagaaacaatatttaatagtttcatttacacagaaaaagaaggtgcaagctctctccctaaggaagagccaaaaagcagcctcaactggctccagagcctgtgctcctggattaagaacagagatcagtgtattggtttcctcttgtggctatgacaagttaccactaatgtggcttagaaaaatactatttttttttctttttctttttgtagagacaggtctccctatgatgcccaggctggtcttgaactcctggactcaagcgatcctcccaccttggcctctcaaagtgctgggataacaggtgtgagccaccatgcctagcccaacactgattttaagatgatatattttcatcttacagttccagatgtcagaagtctgacatgggtcacactgggctaaaatcaaggtgtcaacagagctgctctcctttctggagctctaggggagaatctttccttgtcctttccagcttctagaggctgccttcattctgtagcttgtggtcccttccttcatccccaaaaccagaagtgtagcatctttagatcccctcacccttgtttttctggactctagtgattccattgcccaccctccaccctgcagataatctccctattttaaggtctactaattcaccttaattccattggcaatcttaaacccctttgccacataacctaagatactcacagatcccaggtttaggatgtggacatatttggtggcattattctgcctgccacatctaggtagcaactttatctactcaaacaattgttattgaacacatgccctctttcaggcactaggatatagtagtgaatgaatacagaaaagccccaatcttgtggagcttacactccagtgaagagagatggacaagaaacaaaagtaaggctgggtgcggtgggtcacacctataatcccagcactttgagaggcccaggtgggaggatcgcttgagcccaggagtttgagaccagcctgggcaacatagggaaacctcatctctccaaaaaaaaaaaaaaaaaaaaaaaaatttgccaggtgtggtggcatgcacctgtggtctcagctaatccagaggctgaagtgagaggattgcttgaggctgttgaagctgcagtgagctatgatcacgccactgaactccagcctgggtgacagagcaagaccctgtctcaaaaaagaaaaacaaaaaataaacaacaaaaacccaataacaaaaataagtaaaatgtgtcataggttaaatagtgctaaaaataaagcaaggaaggggaataggagtgtgtgtgttgctattttggacagtatgctggacatctcccatttaccctgccccctgccctgggcctggaagctgacattgtgaacagtgtgaaggggctcccttaccctctggcttcctgttgggcatggctgatgggaagcatcttcaggagactggagggcagaaggcaagtcagcctctctcatcactcatctaaagacctcagccctgggccaggcccagtggcttattgcctgtaatcccagcactttgggaggccaaggtggaaggattgcttgagtccagaagttggagaccatcatgggcaatatagcaagaacctgtctctatttaaaaaaaaataaagaaatatttcttaacgggtatggtgacatatacctgtagtcccagctacttgggaggctgaggcaggaggatcccttgagcccaggagtttgatgctgcagtgagctatgatcatgccactgcatgcccactgcctgggcaacagagcgagaccctggttctaaaaaaaaaaaaaaaaaaaagaacataaaataaataaataacaaagacttcagcccctgccagaggcttttctcacacagcccacctggctctgagaatacctctccattctccccttccagcctagggatggtaactatggttggctatactacccctgagaggactcattacccctgatttctatataccctgccctcacctttgtaaatacaggttgagtatccctcatctggaaatgctcgggaccagaagtgttttggattttgctttttttaaattttggaatatttgtaaatttatatgtaatgagatttcttggggataggacccaagtctaaacacaaaatttatctcttttatatacatcttatacacacagctggaaggtaatcatatagaatagtctaaataattttgtgcatgaaacaaagtttgtgcacatggagcagcagaaagcaaaggtgtccctatctcagccatccgggtggacaatctgtggtgggttggcatcaccaacattcctttttttttcttttagaccaagtctcactctatcacccaggctggagtgcagtggtgccatcttggctcactgcagcctccacctcctgggttcaagcgattctcctgcctcagcctcccgagtagctgggattacaggcatgcgccaccacacccagctaatttttgtatttttagtacagacagggtttcaccatgttggccaggttggtcttgaactcctggcctcaagtgatctgcctgcctcagcgtcctaaagtgctgggattacaggcatgagccaccgtgcccggccattcctgactctgaatttatatgctatcaataagtaatccatttcttgcacctatttacacataagtacttaacagtaaaaaatttggtataccattcataaaatgaaaaaaataatgtatttagggtacctaagcagcatggtagcatcacaggaataccgcatcagtggttaaacagcagagaccaacaatggcaaagctttcagtctcttacctccgatgctgcgttttgattcaaaggttactatatttgcattcagcaggaatggggtaaagaaaaaaagatgaaatataaattaattttacaaaagtaaattttaaaaggttactatacattctatttttaaatctttattattattattgagactgagtttcgctcttgttgcccaagctggagtgcaacggcgcgattttggctcactgcaacctctgcctcctgggttcaagtgattctcctgcttcagcctccagagtagctgggattacaggcacgcaccaccatgcttggctaattattacacttttagtagagatggggtttcaccatgttggccaggctggtctcgaactcctgacttcaggtgatccacccacctcagcctcccaaagtgctgggattacagatgtgagccactgtgcccagccatatacatatgcatggtatatatatatatatgcatggtatatatatatatatatatatatatatgcatggtatatatataaatatatatatatatatatgcatggtatatatatatatgcatggtatatatataaatatatatatatatatgcatggtatatatatatatgcatggtatatatatatatatatatatatatatatatcatgcatatatatacacatacatacacatacaccatatatatgagtaatgtcttggccccacgtgagacattgtgaggaacctgccgttggtgcgtccagcctgaacacgtgctgttttattacgctttgtgggcgtgcttatgtggggatctgggtgagtgtggaaaagacatattgctgctgatgggagctgggaagtctttgattccttggagacagtgaataaactgtgtgttgtgtgctcatgttttagctccaaaccattacatgaagtcaactgtggaattttctacttgtgacatcagggtggcacccaaaaagtttcagattttgaagcattttggatttcagattttcagtttagggatgctcagccaatagtactttattaattggcgagtgctgtctgttttcaccaggaaggcctcgctgagccgcatgtaaaatttaaataaagccccaaagaaggtaaggcaggaggctgggcgggatggctcacgcctgtaatccggcactttgggaggccgaggtaagtaaatcacctgaggtcaggagttcaagaccagcctgaccaatatggtgaaaacctatctctactaaaaatacaaaaattagctgggcgtggtggcctgcgcctgtcgtcccagctacttaggaggctgagacaggagaattgcttgaacctgtgaggcagaggttgcagtgagccaagatggcaccactgcactccagcctgggcgacagagcgagagtccatcacaaaacaaaataaaataaaaatacaaaaattagccaggcatggtggcttgcacctgtagtcccagctgctcgggaggctgaggcaggagaatcatttgagccccggaggcagaggttgcagtgagccaagatggcgtcactgcactccagcctgggtgactgagcgagactccatccctgcccccggcaaaaaagaagaaggtaaggcgggagaaatgcagatttctggcagaagagcatttggggcaaaggggctgcaaggcaaaggcctcgaggtaggagtgtgcatgatgtgtctcagaaacgcaagaaggaggttatgtggctggagtgtgaggggctggggagttgcagaaggtgaggtcgcaggggtgcctggggtaggagggaagtcagatcatgtagggtctttgaaaaacgtgttgcctgtactccacccatttccccttagcacttgccttcaggtgcacacagaccctatggcttcctactgctcctgtagctctctgcctgagggtctttgttggtgaggagtgcaacagctcctcatgcgtggggcaggccaggaagtcaatgcccccttagctctctactattgtggagatggcaaataaacacccaggtgtcttgccttttgcgtctgacaatggggaggtctgctctaggctctctcaggggcctccagtggggttagagtgcaacggcatgatcttggctcactgcaacccctgcctcccaggtataaatgagtctcctgcctcagcctcccaagtagctgggattacaggcatgcgccaccatgtctggctaatttctgtatttttagtaaagatggggtttcaccatgttggccaggctggtcccaaactcctgacctcaggtgatccgtctgcctcggcctcccaaagtgctgggattagaggcgtgagctaccatgccctgcctcatttgttactttttaagggccagggtcttgctctgttgcccaggctggggtgcagtggtagatcatagcacactgtaaagctaaactcctggcctcaagcgatcctcccacctcagcttccctagcagctagaactgcaggcacatgccacaatgcctgggtaattttttatatttatttatttatttatttatttatttatttatttatttatttattgagacctagtcttgctctgttgcccaggctagaatacagtggcacgatctcagctcactgcaacctccacctcccgggttcaaacgattctcgtgtctcagcttctcaagtagctgggattacagatgtgcaccaccacacccggctaatttttgtatttttagtagagatggagttttgccatctctactcattgaccaggctcatctcaaactcctgacctcaagtgatctgtcagcctctgcctcccaaagtgctgggattacaggcatgagccattgtgcctggccaatttttatttttgcagaggtggaggtgcctttctatgttgcccaggctggtctcaaactcctggcctcaagtggtcctcccacttcagcctcccaaagcgctgggattacaggcatgagctgccgtgcccagacaagtagctcccttactagccttccctctcttggcttccttccttgccctgtcttacttccctctctctcttcctatataccaggaatcacctcccagtgaatgctgcgttcaaggtcttgtctcggcatcagcttctggagcatcccaatctaaaacactgccatgaaccgtgattgggacttgggcttctatttttatttttattttgagacggagtctcgctctgtctcccaggctggagtgcagtggcatgatctcggctcactgcaacctctgcctcccgggttcaactgattctcctgcctcagcctccccagtagctgggactacaggcacatgccagcatgcctggctaattacttgtatttttagtagagatggagtttcaccgtgttagccaggatggtctggaactcctggcctcccaaagcgctgggattacaggcgtgagccactgcgccaggccaggacttgggcttttcctgagcttgagagcagtggccactgcccagtggtgagcagaggagggaaatagactgaagggggctggggaggagcagggaaaccagttggatgcgaccatgatccttcagagcgagctgaaggtggcctggagcagggtgagagacgtgggagtagggagaggcagttccatcctgggtacacttggaaggaggagccaacataacttgatgcctgcttagatgtgaaatgtgggaggcagtgaggtgtctagggtggctacaagggggttggcctgagcaaaggaaggatggagttgccttttgctgggatgagaagattgatggtgttgggcagatggggcaggctgttgagatgcctgttaagcacaggactgacaaagctgggctgggagacaggcaggtacttgggaactcaggagggagtccaggctgcaggtgtacgttggagggtcctcacaagttagacagcattcaaagccaagactggataaggtctccaaggcagtaagtgtcaaaagagaagagactggctgggcgcggtggctcacgcctataatcccagcactttgggaggatgaggcgggcagatgtcttgaggtcaggagttcgagaccagcctgaccaacatggtgaaaccctgtctctactaaaaatgcaaaaattagcttgccatggtggcgggcacctgtaatcccagctacgtaagaggctgaggcaggagaatctcttgaacctaggaggcggaggctgcagtgagccgagatcgtaccagtgcactccagcctgagcagcacagcaagactccatctcaaaacacacacacacacacacacacacacacacacattaaaaaaaaaaaaaaagaagaggtttccaggatgagccccgggcactcggtgtttggaagctgggagagggaagaagggtgcagcagagggtttggagaaggagtgaccgcagggtgggaggaaagagagaacaggagagaaatggaagcaagaatggaccacacttgatggaaaattatctgataaaatatttttaattaattttggtgtattttgaaacaatcacaaatttaccaaaaaaatttgcaaggacagtacaaaactgttttgtttggttttaccatgaacaaaagtatttatttagaatgagaaaagtcacaacataatacaaatttaaaataccacaaaatggccaggcatggtggctcatgcctgtaatcccagcactttgggaggccaaggcaggaggattgttgagcccaggagttcaagaccagcctgggcaacgtagcaaaatttagctagaaatggtggtgcatgcctgtagtcccagctattctggaggccaagtagggaagatcccttgagcccagaaggtcaaggctgcagtgaattgttgatcatgccactgcactctagcctaggtgacacagcaggactctagctctaaaaaataaaataataaaatactatgaacatcacaaaattcagaacaataccatattagtatttcattcctatattattaatcaactggctgatgtaacacgcttcctacataatttagctgtctaccctgatcacttcttcaaatagcaacaataatatatgtttttatagagagaatagaaaagcaattttgcatttcctctagagtgattgatccaaaattgtgattttttattatcaatattggaggaagcaaaacttcttttttttttctttttttgagatggagtctcgctctgtcacccatgctggtctcaaactcctgggctcaagcaagcctcctgccttggcctcctaaagtgctaagactacaggcgtgagccactgcacccagcccaatactattttttgatgaaccatttcatattgttactgacatgatgccccttcacccccaaaatagcttgtgttttctacaaacaaggatattcccctccgtaaccacatacagtcatcaataccaggaaaccacacaactgcattactaacacctgctcttccgacccatacagattttaccaattgccctggtatcatccttagtagcaaagcatccagcccaggatcaacacatttagcagtcacatctcttcagttcctgggtctttccctgactttcatgaccttgacacttttgatgattacaagccacttattttgtagaatgtccctcaatttgggctgggctgatattttctaatgataaggtcatattatgtgacccagcaattccattcttagatacatacaaaataactgaaaacaggtgctgaaacaaatttttttctttttgaggccgagttttactctgtcccccaggctggagtgcagtggcacgatctcagctgactgcaacctcctcctcctgggttcaagcgattctcatgcctcagcctcccgagtagctgggattacaagtgtacatcactgtgcctggctaatttttgtattattagtagaaacaggttttcaccatgttggccaggctggtctagaactcctgacttcaagtgatctgcctacctcagcctcccaaagtgctgggattataggtgtgagccaccgcacctggcctcaaatacttccacacaaatgttcattgcagcgttattcaccatagccaaaaggtggaacaacccaaatccccatcaaaagatgaatggataaacaacataaggtatatccacacaatggaatatttaattcagctatgaaaagagatgaagcgctaatacatgctacaacatgggcaaacttcaaaaacattgtgtggccaagtgcggtgactcacacctgtaatccgagcactttgggaggccgaggcgggtggatcacctaaggttgggagttcgagaccagtctggccaacacggcgaaaccccgtctctactaaaaatacaaaaattagccaggcgtggtggtgggtgcctgtaatcccagctacttgggaggctgaggcaggagaatcgcctgaacccgggaggcagaggttgccgtgagtcaagatcaggccactatactccagcctaggtgacagagcgagactctgtctcaaaaaaaaaaacaaaaataaaaataagcctggatcagaatacaaagttcttctggattttaaaactaaaacttgagttctggttctggaacaagatggtacttttccttgctcctccctttggtataaaggctcactcccatgtgctaccttacatctggtaaaacctggagggcctcgagtggcctaactgcaactttccctcctcactctgctctcagtgatagggtcctctagccaaacagccctcctcatcagggacactaggagcagttcttgtttgtccctgagtattgggttttggtccctgttagcccatggaattgtgtaaaaggaccagtcacaacctcccttggaaaccatggagcaccccactctcttgatactgcaaagcctgcctcccacagaccctggctgctccttctgtccccaacacccatgtgaccctgtggggcgtgtggtgctctctgcccccaggccatgagtatatgtgactattcactgttgatgtcatctgtccagtctcaccagttgtatgtttgaccatccccacaaccccagggcaggaattcctctcctcccccaccaagggggtgaggaggaggcaattaaaacactcccctctaaacagaactaaatatcctgggaattatttaacagacagcaataaaaatgacttaaagctgcaaagagaaaggtgagctagctatggaaaaataatgcagtgagttccctgaaactttttttttctttttctttttttgagacagggtctcactctgttacccaagcaggagtgcagtggtgtgatctaggctcaccgcaacctccacctcctgggctcaagcaatcgattctcctgcctcagcctccagagtagctgagattacaggcacatgccaccatacccggctaatttctttttatttttagtagagacggggtttcaccttgttggccagactggtctcgaaccccaacctcaagtgacccacctgcctcagcctctcaaagtactgaaattacaggcgtgagccaccatgcttggccgtgtcttcttcttttaatcttccatataccctagaccaggtgctgaagattcccacaacctagaaattccattaagcacttaaaaaaaaaaagataacaaaatcttgctctctctggacaaatggacaaagaataacttaaggaaaacccgaaagacgcctagtggggagtcccatgccccctccacagcggaagcactggcaggcagcctgacccacctgcaatcacagcctgcaggggcagcgtcagcttagctctgtgtctacctgccctccatgcagtggcataagaagacccaggccctctaaaccatttagcagaagaatgtagcccgcaaacaccaagcagctcagggaagtgccttctgccttaaacgatgacatcgacagagatggggcagggctagaagtagccccagcagtgctagaagaatcaagcagttccaaatcacattgaaagtgttctgatgggccgggcgtggtggctcacgcctgtaatcccagcactttgggaggctgaggtgggtggatcacctgaggtcgggagttcaagaccagcctgaccaacatggagaaaccccgtctctactaaaaatacaaaattagccaggcgtggtgctgcatgactgtaatcccagctacttgggaggctgaggcaggaggatcgcttgaacctgggagacagagattgcagtgagctgagattgcgtcattgcactccagcctgggcaacaagagtgaaactccatctaaaaaaaaaaaaaaaaaaccagaaagaaagtgttctgatgatgaccaaactgtccctggaactaatgcctacaaatatatgtcagaacctatatactaaagctaaatagagtgactgcctgctaaaacatattaaaaaacaattttttaaaaaaggcagacttgttctgtcatcaggctgcagtgcagtggtgcaatcacagcccactgcagcctcaacccccttagctcaagtaatcctcctgcctcagcctcccgagtagctgagaccacaggtgcacaccaccatgcttggctaatttttgtcatattattatttgtagagacagggtctcgctatgttgcccaggttggtctcaaactcctgggctcaagtaatcctcccacctcagcctcccaaagttctgggattataggtgtgagacaacgcatgcagccctaaaacagatttaaataggatcaagcgtgtgctaacataatatccagtgtccagaatacaattgcaaaacactcatcatcccaaagaaccacagttcgaatgagaaaagacaaactgcctccaaaacccagataaatcagatgttgaaattacctgacaagaattttaaagcagcctcataaaaatgcctcaacaaacacttataatgaaaaaaacacttataataaaaaaaatgtttaaaattctcggcaaagaaagagcagtaatttaaacaaagaaccaaatggatcttataaaactgaaaaatacaataactgaaatttttaaaaatgtactagatggactcaatagtataaaggagatgacacaagatagaaacgataaacttgcaacagatcaataggatgtactccaactaaacaacagaaagaaaacagactgaaaaaaggaaaaagagcttcagtgttctgtggggcagtaacaaaagatataatgtttttgtatataatccaaatcccagaatgagaaaagagagtgtggactaaaaaagtattaaaagaaatacgaaaagaaatccaccccaagatatatcataatcaaattctgaaaactaaaaacaaagacaaaaatcttaaaactagccaggcaaacaatgtgttccctataaatgaatatcaattcaaatgataatgaatttcccaccggaaaccacggaggccagaaagaagtggcccaactttttttttttttttttttttttgagacagggtctcactttgtcacccaggctggagtgcagttgtgcaatcttgcttactgcagcctctgccttctgggatcaagtgatcctccgacctcagcctcccaagtagctgggactacaggtgcacgccaccaggctttgctaattttttaaggtttttatggagacagggtctaacaatattgcccaggctggtctcgaactcctgggctcaggagatcctcctgccttggcctcccaaagtcctgggattacaggcatgagccactgtgcctggccagcccaacattttttaactgctgaaagaaaagaacctcccactgcaaatcctctatccagtgaaatcatccttcaggaataaagggaaaataaagtcatttgcacacaaaggaaaactaagagaattgttgttagtggatctatccttagaggaagctccctaaacagaaagaagatggtaacagaaggaggttggaacatttaagtcttatgttagaaaaaaggaaaaaatctcaaatcaatcatttaagcttccttctcaataacgtagaaaaagaagagcaaattaatcccaaagcaagtagaaggaaggaaacaataaacacaagagcagaaatcaacaaaattaaaaaaacaatagagaaaattaaaccaaaatctggctcttcataaagatcaacaaaatatataaaactcttgcaagattgacagagagaaaaagggagaagacacacatcatcaatatcaagactgaaacggatgatattgcaatcgatcctgcagccattaaatagatactaatgggatactataaataactttacactcataaattcaacaacttagaagaaataaggttattcctcaaaaaccacaaaactgggccaagatgaaatagataacctgaattattctataactgttaaagaaattgaatttataattataaaactcctgaaaaaggaatctctatgaccagaatgtttcattagagacttgtaccaaacattcaaaaatgaatgtttcaaaagattcatgaacatcaattttgcacaatgtctttcagaaagcagaagaggagtgaacacttccaaactcattttattgaggccagaattaccctgataccaaattttgacaaaaaagaaaactacaaggctgggagcggttgctcacacctgtaatcgcagcattgtgggaggctgaggtgggcggatcacctgaggtagggagtttgagactagcctggccaacatggtgaaaccctgtgtctacaaaaaatacaaaaatcagccaggtgtggtgccttgtgcctgtaaccccagctactcaggaggctgaggcaggagaattgcttgagcccaggaggcagaggttgcagtgagccgagatcataccaccacactccagcctgggcaacagagcgagactctgtctcaaaagagaaaaaaaaagaaaactacggactaatatgtcttatgaacttagagacattctcgacaaaattttagcaattgaattcaacaatgtataaaaagaataatacacaacaaccaagtggaattttttacaggtatgcaaggttggttcactattcaaaaatcaatcaatgtcatccaccagataaataggctaaagaagaaaatcatatgattatgtcaactgatgcatttgacaaagcatttgaaaaattcagcacccattcatgataacaactcttggtacgctaggaattgaaggacacttcttcaacctcataaagggcatctacaaaaaacctaaagcttacatcatacttcatagcaaaagactgcatggtttcccctatggtcagaaacaagataagaatgttcactcttatcatttttattgaacataatattggaagttctagccactgcaataaggcaaggaaaagaaagaagcatacaaattggaatggaaaaaagtaaaactgtctctgtttgcagatgacatgttgtctacaaggaaaatcccaaggaatctacaaaaaactcctagaactaattaaaaagttcagtgagttcagtaaggttgcaggatacaagattaacatacaaaatcaattgcatttctatatactgacagcaaacaagtggaaatcaaaataaaaaacacaataccacttaaaactgctccaaagaaaatcaaatccttagctgtaaacctaacaaaacatgtatagaatctgtatgatgaaaattacaaaatggtaatgaaagaaataaaagaaaacctaaatagttggagagacatactaaattcatggatcaaaagacttaacatagtaaaaatgtcaagtctctctaaatgatctataggtttaatgcaattcttaccaaattctcagcaagaattttgtagacataacaagcttatgctaaaatttaggccgggcacgatggctcatgcctgtaattccagcactttgggaggccgaggcaggcagatcacttgaggtcaggagtttgagaccagcctggccaacatggcgaaaccccgtctctactaaaaatacaaaaattagctgggcatggtggtgcatgcctgtagtcccagctactcgggaggctgaggcaggagaattgtttgaacccaggaagtagaggttgtggtaagccgagatcgcaccactgaactccagcctggatgctgcagtgagactttgtctcaaaaaaataaataaataaaataaaataataaaatttataggaaaagatacaagacctagcttggccaaagcaattttgaaaaaagaaaaaaagggatatggtggaaggaaacactctactggtgttaagattttaagattttactacatagctacagtgagtaagacaatgtggtactgcctagggatagacatatggatcagtggaacagaatagggaatacagaggtagattcacataaagatgcctaacagttgacaaaggagcaaaaggaatttaatggaggagaaatacacttttcactaaatctgctggagcaattggacattcataggcagaaaaatgaaactcaacttgtctcacacctcatacaaaaattaaaaatggatcatggactaaaatgtaaaatgtaaacttatcaaacatctaggagaaaatataagaggaggcggggcacggtggctcacgcctgtaatcccagcactttgggagggtgaggtgggcggatcacttgaggtcaggagttcaagaccagcctggccaacatggcgaaacccgtctctactaaaaatacaaaaaattagctaggcatggtggcaggtgcctgtaatcccagctacttgtgaggctgaggcaagagaattgcctggacccaggaggcagaggttgcagtgagccaagatcatgccactgcactctagcctgggtgacagagggagactgtcaaaacatatatatatatatatatatgtttccatatatatatatatatatatgtttccatatatatatatatatatgtttccatatatatatatatatatgtttccatatatgtatatatggaaatgttcagaatctaagattgagtattatctataaaaacatgatccataaaaggaaaatttgataaaccagaccttattaacattaaaatgaaaaacttttgctttgcataagactaaggatgaagaggcaaaacagagactaagagatactatttgcaaatcacgtatgtgaccaaggactagtatctagactgtaaaaaacccctcagaattcaatagtaaaaaatgaaacaaaactctcaaacaatccaaattagaaaataggcataaaatctgcacagacattttgctaaagaggatatacagatggcaaataaagatgctcaacatcattagctggtagagaaatgcaaattaaaacttatcgagatactacagcactcctatcagaatggctaaaataaaaaagtagtgataacaccaaatgctggtaggcgtgtagaaaaactggatcacttatacattgctgatgggagcatgtaaaatagttctgccactctgaaaaatggtttggcagttcctttgaaaactaaaagtgaacttatcgtatgacccagcaattatactcttgggcattttttttccagataaatgaaaacttatttttatgtagaagcgtgtatataaatgttcatagatgctttattcataatagctccaacttgaaaactacccaaatatccttcagtgggtgatggttaaacaagctgtgatagattcataccatagagtgctactggcaataaaaaggaatgatctactgatacacacaacaacatgaatgaacctgcagaaaattatgttgaaaaaagccagtctcaaaagaataatactgcatgaatctgcttgtataacatttgtaaaataatataaagactgagaatagattcctcgttgccaggggttagggttgagggaggatggggaagaaggaaggggtatttgtataaaagggcagtactaggaatcttgtaatagcacagttaagtttgtttgttcgttcgtttgtttgtttgtttgttttgagacagaaccttggtctgtcgcccaggctggagcgtggtgacgtgatcccagctcactgcaacttccgcttcccaggttcaagcaattcacctgcctcagcctatgaagtggctgggattacaggcacccaccaccatgtctgggtagtttttatattttagtagagatagggtttcaccacgttggccaggctggtcttgaactcctgacctcaagtgatccacccacctcggccacccaaagtgctgggattacaggtgtgagccgccatgcccagccattaaatatcttgattggggtgatggtcacacaaagctacatatgtgacaaaattgcatagagctacctgcacgcacacatgcatgcacacgcacaaaggcatggataatcagtaaaatctaaataaactgttcatggcaccaatgtccatttcctagtgttgatattgtactatagttatataagatgttaccatagcagggaattgggtgaagtgtacacaggacatccctgtacatttatttgcaatttcctgtgaatctataactatttcaaaataagcagttttgaaaaataaagcttgaggcccagcagtggtggctcacacctgtaatcccagcaccttaggaggctgaggtgggcggatcacctgaggttgggagttcaagaccagcctgaccaacatggagaaaccccgtctctactaattatacaaaattagccgggcatggtggcacatgcctgtaatcccagctactcgggaggctgaggcaggagaatcgcttgaacctgggaggcggaggttgcagtgaaccgagatcgcaccattgcaccccagcctgggcaagaagagcgaaactccatctcaaataaataaataaagtttgagactttgagcccatggaggacttcactttggactctgggaggccgtctctgtgctctgctacccctctggaacaggatgtcagttttattatatgtccttacacagtgcccgactcctatggggtgctcaatgaatatttgcccaacaagaatggtaaggaataaggacattgggactccttagggagaagtgggagcccaggacgcccagctccccagcctgtgttggccttaatgtgtgtctataccaggggtcacctaaataagctctaggtatggaagagagcttgcattattccagcaatgggtacatgaaatgacaccaagctggagttcgtttattccttcagtatcttcagtaaaggcaggaggtgaaaggaccttacagctaaggtgcaggggatgtggaggggccattccccatctttctgtagggcacattgaatagaggttgttttggttgttgaagtgctttagaaaccaagtgggggcaaaaacacaagtgtgtcaggaggcgtgggtaagagaggggcattcagagttaggtgggcaggtgaggaggcagggaggtagagacggtggagtctgtcccagcatggccacgagagaagccacagccctggcaggtggggctgttcacacctctgagccacaggcacagccccaggtggggcagccctcatgcctccagtccccatcccctaagcctcagggcttacgccttgtctatgggtggcagggaagtattttctgcattctctctgttctctttcttcctcacaatggcatcacctcctgttctctcttctctcacttacataacacgagctccattatctcacaatagatgtgagtagatactgaggaggtaggagtagaaggtcttgaggtagggggtgggtttcaactccagaggtgtggctcagatgctggaccagattgaggactagctaaaacagggatgaggtggaagcagctttccataagacacgcccaccagtgcgccatgtcagtttatcattgccatggcaacacctggaagataccccctgccttttcatggcaatgacacagcgacccaaaagttactacctctttcctagaaatttcagcataaaacaccccttaatctgcatgcagataagagtgggtataaatctgactgcaaaactgctctgagctgctactctctgcctatggggttgccctgctctcaggagcagtgacagagctgcaacagggatggagctgcaacactgctgcttcaggaaagcgttttcttctacctctggcttgcctttgttttatttgttttgttttgttttgttttgttttgttttgtttttatttagacagagtctcgctctgtcgcacaggctggagtgcagtgacgcaatctcggttcactgcaaccttcgcctcccaggttcaagcaattctcctgcctcagcctcccgagtagctgggagtacaggcacctgctaccacacctagctaatttttgtatttttagtagagacgaggcttcaccatgttggccaggctcgtctcgaactcctgacctcaggctatacgcctgccttggcctcccaaagtgctgggattacaggtgtaagtcacggcacccagcctctggcttgcctttgaattatttcctgggcaaagccaagagccctaatgggctaagctccagtttggggcttgcctgtcctgcgtcaatctgaatggacatttcgcatgggcccagcacacagtgcctcccaaactataaatcagacctgttctgaggatcctgtgctctcatctcagttcttggcacccaatgtgggcctgtctctggctaagaacagtgactaggagcatgtcaccaccctccccgcccacaatgactgtttcagagatggaagtgttacccaggcagctccagagggaactttactgtgtgcatgggatctcccgcttctgctggagctgacagctactttctcacctctaggaaagaccaagaaggaaacagacgcccaggagagacaaacagagctgagggctggggcaggagactgggccctccagctacccctgaaacagcctgcttcaagacctctgagcttttcagtttatgtgagcaaatatgtttccttcattggcttatgccagtttgaactgggttttctctcccttgcaatacagagtcctcactgtattgaatgtggaggggccattccccatctttatatagggcacactgaatagaggctgttttggttgtggaagtgcattagaaaccaggtgagggcaaaaacacatgtgtcaggaggtgtgggtaagagaggggcatttagagttaggtgggcaggagaggaggcagggaggtagggacagtgggggtgataaaatgatgatctatactcacattgtcacaggcctaacatgtggattttcagcatcacatctgctgtttaacatgatagggaaaactccccatcactatgagaaactaggaaatggcatgagactagcccatgattcctgcaaagggaaatctcatctgaggagccgatggatagcagagtctagcagaatgatgctaagacctcagaacttcaggggctggggatgagggtgagctatagggcagttattaaaacctctaagaagtatattggactctggaacccccaaatttaggatttgggatgacccccacagtggtccaacagagatgtgcaagaaagagtaaaatttgtaaagaatctaattcatattcacaattttcagaggtaattgcatctaaaacatgagagcaaaaaaaaaaaatacacgaaaatggaacaatctagggacagaaatgttctcggagatgaaaaagttgatcactgaattttcatatgcaagagagcttgaatgtcaaataaaaaaataaaatgcaaaagaggcaggaggcagtgaacaacagactcgataatgaaaaaagaaaactgaggcagtgaattagaacacaggatcaaaaaattctcccagggaaaacccgagacatataaaagactaaataatacatatgaagtttgactgaaggtagctctcagctagacaaagcagaatcactggaaaagaaatgatggtcaaaaaaccaatatagagccttcaatcccagcaccatggtgggctgagctaacagaaccccctgctcaccacacacatacagaaacatttggtaaaatataataatacagactgggtatcccttatctgaaatgcttaagaccagaaatgttttgaatttcagttttttttttttcagactttggaatgtttgcattgtgcttattggttcagcatccctaatccaaaaatctgaaatctagaatgcttcattgagtattttctttgagtgtcatgtcaacactcaaaaagtttggagcattttgaatttcagatgtttagattaaggatactcagtctgtagttaataataattaataaagcatttttaaatgcatggcagctgggcatggtggctcagacctgtaatcccaggattttgggaggctgaggcaggtggattgctggagcctgggagttcgagaccagcctgggcaacatggcaaaaccccatctctacaaaaaatagaaaaagttagctaggcatggtagcatgtgcctgtggtcccagctacttgggaggctgaggtgggaggatttcttgagcccaggaggtcgaggctgcagtgagctgtgattgcaccattgcactccagcctgggagacagagtgagaccctgtctaaaaaaaaaaaaaaaaaaaagcatggcggatcatgaaagaacaaaagaaatttaaatccctgagtaccagaactggagcaacaactcaaggccagagaagtgagttcatggcagaagctgaagcagctgtgagcctatcagactagatgcagagccagggccagggctggggggtaacatctgccgaaataaaggacaaggacacagacaaccccaggtggggagctggaaccacagtatgtgtgtaaagctggggctctggaaaggctgttccctaatgtgagaagaaactagagaaataccactggagggagacaacaagaacgtctgtctttgcctggacctctagatggttaaaaaaaaaaagaaaagaaaagaaaaacaaacaaaagaacaaaccccccacaacctctcatgagaaaataaaaaccaagaatatatatgtgtaggtactggatccaaattaatactacgcacattatataagccccaaggtaaggagattcaaaacctagcccacagtagtgaaacttctggactttcttggcattaaaatgcatagttcaggccgggagtggtggctcacgcctgtaatcccagcactttaggaggctgaggcaggaggatcacttgaggtcaggagttcaagaccagcctggccaacatgatgaaaccctgtctccactaaagtacagaagaattagctgggcatggtggtgtgcacctgtaatcccagctactcaggaggttgaggcacgagaattgcttcaacctgggaggaggaggttgcagtgagctgagatcgcacaactgcactctagtctgagcaacagagggagacttattctcaaaaaaaaaaaaaaaagcatagttctgttctgtggcaacactgctgtaacttcaagtacacagagcttgattccatagacaaagacaatctccactgaagatgagctcacagctctaaaatgtacatgtgtgaagaaataattcatcttgaaggagagtcagcagactcaacatacaaaggagtatcaccccgagaattcaagacaaaagaacaaattaaaagggaccaaaataatgctgcaaaagaacaatttgaaagggctccaagggtgtaagacgataagagataaaaggactgggaattataatgaagtaattagagtctacaagaaaaaaaccccagcaagtttgaaaaagataataattttattttattttttattttttttatttttttttgagaggaagtctcactctgtcacccaggctggagtgcagtggtacaattttggctcactgtaacctccaccttgcaggttcaaacaattctcctgcctcagcctcccgagtagctgggattacaggaacgtgccaccacgctcaattttttatgtttagtagagacgggtttttgccatgttggccagtttggtctcaaacttctgatctcaggcaatctgcccgcctcagcctcccaaagtgttgggattacaggcgtgagccactgctccaggccaaagagcataattttaaacatacaaaattagcaaacttgaagacatggcaacagaaaacatagaagagaagcaaagtgaagaagaaagataaaagactttaacaaatgaacagtctcagtgacatatgagacaatatgaaatagtctaaaataggtaaaaaaggagatacacaatgaagtggggcagatttttcccaagaaataaaggtccaagatttcccagagttgatgaaatatttacactcatagatcaaagaatgttgacatcccaaagcaggataatcacaaagaaatcgtaattaaatggttgaaaacaggtaataaagagaaacttaaaagcagttatatgaaaatattttaaaggcacattacatacagggcttacaaagataagagttaatgctgacttgtcagaaacaatgcaatcaaaaagataatgaaatagcatcttcaggtgttaaaagaaaaaaaagatcacctttgctggatatagaattactggttgactttttttttccttttagcacttgagaaaatatgtcactaacgatcttcacctcaaggaatagcaaagaaagttcttcaggctgaaggaatatgacaccttggatcaaatcaaataaggaaacttggatcaaatcaaataaagggccagtcgtggtggctcatgcctgtaatcccagcactttgggaagctgaggtggaagcatcacctgaggtcaagtgtttgataccagcctggccaacatggtgaaacccggtctctactgaaaacaaaaattagccgggcgtggtagcaggcgcctgtagtcccagctactcgggaggctgaggcaggaaaatttcttgagcctgggaggcggaggttgcagtgagccgagatgacaccactgcactccaggctgggcaacagagcgagactctgccctgctgccccacccctactcccccaaaataaaaatcaaataagggaagggaggtggaaatggtagataggtaaataaatttaagccttttcttttttttaactttaaaaatatatttgattatttaaagaaaaacagtaaaactgcattttgaggtttagaacatatgcaaaagtaaactatatggtggcaagtatacagagagcaggaggtaaatagagtatactattgcacagttattatactatacatgaagtaatataatgttacttggaggcagactatggtaagttaaagatgcataaagtaaaccttagagcatgactaaaagtaaaatgaaaaagtattgctaatcagccaacatagaagtggaataaagaaaaaaaaatgtatctaaaagaaggcagaaaagaggagcaaaagaaccatgaaaatggaacaaaaagaaaataaacaagacagtgcaccaacactcaaccatatcaataattaatttaaatgtaaatggtctaaatgccaaaaggtggaaattgtcaaactggataaaaaagtaagaggaaatcatatgctgtttaagaaacactttaaggtagagcacaatggctcatgcctataatcccagcacattgggaggccaaggcaggaggattgcttgagcccaagcagtttgagacaagcctgagcaacatagtgggaccccatgtttacaaaaagatgtctaaaattagctaggtatagtggcacacgcctgtaatcctagccactcgggaggctgaggaagaaggatcacttgagcccaggaggttgagcctgcattgagccatgattgtgcccctgcactccagcccacagagcacgactctgtctcaagaaaagaaaaataaataaataaataaaaataaaaacactttaaataaaaaacagataaatgcgaaaaaaggaaaaatagatatcatataaatacttataagaaaactgaagtagctatattaaaatgttacaatgtagacatcaggatagagtattattggaaataaacaagagcattctataatgatgaaaggctcaattcatcaagaagacattaaaaacctaaaattttatgcacttaataacagagatgcaaaatgtgcaaagcaaataataacataattaaaaagcagaaacagatacaattacaatcatggttggagatttccagaatcctctttattaattgatcaaataagtagacagaatatcagtaagaatatagaagacgtgaacaattttttttttcttttttgagatggagtctcactctgtcacccaggctggagtgcagtggcacaatcttggctcactgcaacctccacctcccaggtttgaccaattctcctgccttagcctctccagtaactgggactacaggtgcacgttgccacactcagctaatttttgtatttttagtaaagacagggtttcagcatgttggccaggctggtctcgaactcctgacctcaggtgatccgcccgcctctgtctcccaaagtgctggggtgacaggcatgagccaccgtgctgagccgaagacatgaacaatattatcggctaacttgtcataactgacacttacagaacactacacttaataatggtgaaatacacatttttttcaagtgcacatggaccatttgctaaatagattgtatactgtactataaacaagtctcaatacatttaaaaggattgaaataatagagtatgttttctaaccataaaatgttaacttaaaaatcaataagatagctattaaatccccaaatatttagaagttaaacaatacagtcttaaataatctatgagtcaagaagaaatcagtcagaaaattagaaaatatcttgaactgagtaaatggaactgcaacacactaatttattagtacacagttaaagtggagttgagagcaccaaaacagtgcttaaaggaaaacttaaaaacatttagaaaagaagaaaagtctcaagtcaccgtcaccagtggggcctgatctaagctgatctaagcttccatcataagaagctagaaaaagaagagcaaattaaacccaaaagaagtagaaggaaataggccgggcatggtggctcatgcctgtaatcccaacgttttgggaggctgaggtggggggatcacgaggtcaagagatcgagaccatcctggccaacatggtgaaaccccatctctactaaaaacacaaaaattagctgggtgtggtggtgcaggcctgaagtctcagctactcgggtggctgaagcaggagaatcgcttcaacccaggaggcggaggttgcagtgagctgagattgcacgactgcactctagcctggcaacagagcaagactccgtctaaaaaaaaagaaaaaaaaaatgaaggaaatagtataaatcagggtggaaatcaatgaaattgaaaatgtacaaataatagagacaatcaaagaaagaaaaccctggttatttgaaaagatcaataaaattataaacatctaattaaaatgatcacaaaaaagaatgaagacacaaatgaccaacatcaggtatgaaagagaagtcagcactaaagatcctatagacattaaaagaataataaagaaatattataaacaaatgtatgcaaataaattgataaacagatgaatggacaagcttcttgaaagatacaaagtatcaaaactgactcagaaagatggttgactggatgcatctggtattcgtctcttccatggagaggaatcaaaatagcccacagataatcacactttggatagatcatctaagagagaacaccgaattcaacagagtagcactgaaagcaagggaggagaaagaaatgaggcagcttattcagctgagattggctagaagtctggagcagctgtctaatgcagggaaaggtaagtgaaagaccctagatccacattcctgctgtggactcctataatcctagccaagggagagcccctcgacccttgcaggccccaagatgagcatagggagctgcctagagactatgcaaaggtataaatccagaaagataactcatgctgggtcccgccaactcctgagtcttgagcagctgcagtatggcaccgttttgagagcacaggccccaccagactaagtcctgccctggcactgtactgaggcaggggccacaggcagcaatcccacccccctacccccagcagagggacgactgcacatcttcatgcaccccaaggacaaattccactgcttacaccactgccactgagggctgccgggggccaaggcatgagtgtgagcaaagcctgtacactgccccacagctgcctgcctatggctgctgccagggaatccaacctcatcctcccctgtagcaaggccacagggcagcagctgatgtcccgacctgagctttccatgagcatcctggggatcagcccacctctgcctaccacagccagagattgcatgcagcactagggggcctgaggacaggtccgccatggcctgtcttcaccaaccttaaagtatccaagcatgccatccagggacctggggatcacctgtgcacactgtccagggccctggggattgcccagcctaatccatcactggtggcacctgagcactccccctggggtctgaggtcatgttcactcaagctcccactactgccacagttggtactcatctgcatgtgccatctgtgggtctggggaccagcctgcccaacctgtcacagccattaccaactccagtgtggactgcttgggtcccggagggttgtctcaccacactgctacctccattgctcaggggctcaagagcctgcccacgcatctgactgctgccgttcctggcacccaagaaagccagcaggaggcccaagaatcagcctactaacacaagtaccagtgtatgccaccctgaggcccaaggacaggcatgttcagcccattgctgttaccactggggactgaagactggcccatttagcaccccagccctcaacaaaatttcaccacagcctccattaacaaccacaccctaagccactaaagaaattgcagacaccactggcaacgtctacagccaaagaaatcatacagagactacactaccgtacacacccagaatttaaactgaagtgccctacctaccaacaccatagatacctcttaaggaaaaagtcctccctgatgaaagcaaattcaaaaaaataaaaaggaagaagcaattgttacaccagatgtgcacatatcaatgtacggacacaagaaaaatgaaaaatgaatatgacacctccaaaggaatacaagaaatctctagcaacagatctcaaaaataaattaatgaaatcccagagaaagaattcaaaatattgatactaaagaagttcaatgagaaaagagaattctgaaaaacaacacaaatcagaaaaacaattcaggatatgaatgagaaatttaccaaaaaaccaagcagaaaaaagaaccaagcagaaattcaggaactgaataatttattcaatgaaatacaagatatatttgaaaacttcaacaatagactagatcaagcagaaaaagaatcttaaaatttggctgggttaggtggctcatgcctataatcccagcactttgggaggccgaagtgggcagatcatctgaggtcaggagttcaagaccagcctggtcaacatggtgaaatcccatctctactaaaaatacaaaattagctgggtatggtggtgcatgcctgtaatcccagttacttgggaggctgaggcaggagaatcgcttgaacccaggaggcagaggttgcagtgagctgagattgcgccattgcattccagcctgggcgacaagagcaaatctctgttaaaaaaaaaaaaaaaaaaaaaagaggaaagaaagaaagaaagagagagagagaaagaatcttagaatttgaagatgggtcttttgaaataacccagtcagataaaaataaagaaaaaaaagaatgagccaaaccttcatgacatgtgggacactataaagtgagaaaatattcaaatttttgatatctcaaaaggtgaaggaaaaatgaaagggttagaaaccctatttaatgaaataatagatgaaaatttcccaagactagcaagagatttagacatccagatacacaaggctcgaagatccccaaatagatacaattcaaaatagtcaaactgttgagagtcaaaaacaaagagaaaattctaaaaacagcatgagaaagtatctagtcacctagaaaggaaccccaatcagacttacagcggatttcttaggggaaaacttacaggccaggagagaatgggatgatatattttaagtgatggaggaaaaaaacaaaaaaaaacaacaaaaaaaccctgccagcccaggatactctacccagcaaaattttccttcacaaatgaaggagaaataaaatctttcccagacaagcaaaagctggggaattcatcactgttagaccagtcctacaagaaatgcataagggagtcctatacctggaagtaaaagatcaatactagcatcatgaaaatacacaaaaatatgaaaaccattggaagagcaaacacacaaacaagaaagagaaaaaaacctcaattgttatgactgtagaataccacaaaaccatagtgataaacaaaaagagagaaagaaaagaacaaagcgtatagaaaacaagcagaaatcaagtaatagaatgacaagaataagcccttacatatcattaataaccttgaatataaatgaattaaattttggccaggtgtggtggctcacacctgtaatcccagcactttgggaggctgagaggagtggatcacctgaggtcaggagtttgagaccagcttggccaacatggtgaaaccctgtctctactaaaaatacaaaaaaattagccaggtatggtggccagcacctgtaatcccagctatttgggaggttgaggcaggagaattgcttgaacctggaaggcggagattgcagtgagccaagatagagccattgcactccagcctgggcaacagagagagacttcatctcccaaaaaagtataataacaataaaataaaaaataaataaataaataaacatggcttaaatttccactcatatagactggctgaatggataaaaaaaaaacatgacctaactatatgctgcctacaagactgaaaacaaaggaatggaagaagatattttatgcaaatagaaaccaaaagtgagcaggagtagctatacttatataagtcagactttgtgtcaaaaatagtataaaagagacaaaaaaggtcaccatataatgaaaaagagatcaattcagcaagaggatataacaattctaaacatatatgcacccaacactggagcacctagatatataaagcaaatattattagatctaaagggagtgatagactccaacacagaaatagttggagacttcaacaccctattctcagcattagactgatcatctagatagaaaattaagaaaaaaaattggatttaaactgcacattagaccaaatggacataacagaaatttatagaacatttcatccaacagctgcagaatacacagtcttctcatcagtacacgaaacattctccaggatagaccatatgttagaacacaaaacaagtctcaataaatttttaaagattaaaattatatcaagtatcttctcagatcacaatgaaataaaactagaaatcaataacaagagaaactttgaaaactgtacaaatacatggaaattaaatgacatactcttgaatgaccattgggtcaagaaagaaataaagaggagatttaaaaaatttatgaaataaatgaaaatcaaaacagaacatatcaaaacctttgagatatagcaaaaacagtgctaagagagaattttatagcaataaatgcctacatcaaaaagtagagaaatttaaaataaataatttaatgatgtacttcaaggaactagaaaatcaagaacaaaccaaacccagaattaacagaagaaaataaataataaaaatcagagcagaactaaatgaaatagagacttaaaaattacaaaggataaataaatgaaaagttggttttttgaaaagataaacaaaattgataaaccacttgctagactaaacaggaaaaaaagagagaaggcccaagtaaacaaaataaaaaataaaaaaggagacattacaactcatactacagaaatacaaaagatcgtgagagactatgatgaacgtctacacactaacaaactagaaaacctagagtaaatggataaatccaggacacgtactacctaccaagatggaatcaggaagcaacagaaaacctgaacaggccaataatgagtaatgagattgaatcaataattaaaagtccaagacaggatggcttcactgccaaattctaccaagattccaaagaaggactaatatcaattctcctcaaactaatcaaaaaaattgaagagtaaggaattctccctactcattctatgagaccaaaattaccttgataccaaaaccagacaaagacacaacaacaaaagaaaactacaggccaatatccctgatgaacacgattgcaaaaattctgaacaaaatactagcaaaccaaatccagcagcacatgaaaaaaaaaaaaatagggccgggtgcagtggctcatgcctgtaatctcagcactttgggaggctgaggtgggaggatcacctgaggtcaggagttcaagaccagcctggccaagatggtgaaacccccccatctctactaaaaatacaaaaattagctgggcgtggtagcgggcccctgtaatcccagctactcgggaggctgaggcagaatcgcttgaatccaggaggcagaggttgcagtaagctgagatcgcaccattgcactccagcctgggtgacagagtgacactctatcttaaacaaacaaacaaacaaaaaaatacaccatgaaaaattagccgggcatggtagtaggcacctgtagtcccagctacttggcaggctgaggcaggagaatcgcttgaaccggggaggcggaggttgcagtgagctgagattgcgtcactgaactccagtctgggtgacagagctagacttcgtcttaaaaaacaaaaacaaaaacaaaacgaaaacaaacaaacaaaaaacaccatgatcaagtggaactttgaaaactatgcaaatacatgaaaattaatcccagggatgcaaggatcattcaacatacacaaatcaaaaaatgtgatacatcatatcaacagaatgagggacaaaaaaacccatatgatcatctcaatagatacagaaaaagcatttgataaaaacactcaataaactaagtatagaaggaatatagctcaatataataaaggccatatatgacaaaaccacagctaacatcataatgaatggagaaaaggtaaaagcctttcccctaagaactgaaacaacacaaggatgccttttttcaccactcctattcaacatagtactggaagtcctagccagagtaatcagacaagagaaagaaacagaaggcatccaaattggaaaataagaagtcaaattgttgatctttccatatgtatatataaacagggtcttgctctttcacccaggctggagtgcagtggtgcgatcttggctcactgaatcctccgcccccaggctcaagcgatccttccgcctcagccccctgagatatatatctctctatataaatataaatataaatatatatatatatatatatatatatatatatatagttttgaacaacatggcaagaccccatcgctaccaaaaatacaaaatattagccaggcatggtggtgtgtgcctgtggtctcagctactcagggggctgaggtgggaggatcacgcccggccaggttacttgatttttgacacaggtgctaaggttatttagcatcaagaaaatgaaagtcttcatagaaaatagtcccagacacttggacatccataggcaaaagtgaacctcaacctttatgtctcaccttacacaaaaattaacttgaaatagagtagtagacttaaatgcaaaatacaacattaagaaacttctataagtgaatagaggagacaatctttgtgagcttgggataggcaaagatgtcttaaacaagacataaaagcactaatcttaaaggaaaaacttgacaatttttttccttcatcaaaataaaaaaaactgctttctgaaaggcactttaaaaataaagtcttgaagtcaggatttaagaccggcatgggcaacatggtaagactctgtctctactaaaaatgcaaaaaattacccaggcatggtggtgcatgtctgtcatcccagctacttggggggggtgaggtgagagaattgtttgagccttggagggtggaggttgcagtgaggagccaggatcacaccactgcactccagcctgcgtgacagagagaggccctgtctaaataaataaataaataaagtcaagacaaagggtataagacaatattgtcaatacacagctcttacagaaagacttgtataatatcttacaaaagattcaataagaagaagacaactgaattttaaaatggacgaaagatttgaacagacatttcacgggctaagaagcacatgaaaaatgctccacatgattagtcattaggaaaatattaattaaaactacaataagatatcaataagcatccctactaaaatgggctaaaacgaaaaagacagatattctgagctctggtggaggagctagagctcgaatccctggctggaggaagtgtaaaatcgctcagctcctttgcaaacagtttagcagttgttataatattaaacgtacactcgataaagaaaatgtgatatatatataccatggaacgctactcagccataaaaaggaatgaaataatggcattggcagcaacctggatggaattggagaccgttattctaagtgaaataactccggaatggaaaaccaaacattgtatgttcttactcataagtgggagctaagctatgaggatgcaaaggcataaaaatgatacaatggacttttgggactcagaggaaagggtagtgggtgagggataaaatactatacattaaatacagtgtacactgctcgggtgatgggtgcaccaaaatctcagaaatcaccacgaaagaacttatgcatgtaaccaaacaccacctgttccccacaaaacctattgaaataaaaaaataaaaataaagttgaacaggagaaaaaaaaaatacactcatcacatgacccagagattccacacttagatatttacccaagagaaagaaaaacatatacccataccgagacttgtacacaaatgttcatagcagctttactcataaaaaccaaaaactggaaacaatccaaacgacagataagtgaaaacacaaattgtggtgtatccatacaacagaacactattcagcacaaaagaggataaactgctggtatgtgcaatggcatggctgattctcaaaagcataagtgatctctcaaaatgatgcctcagccagcagaggtggctcatgcctgtaatcccagcactttgggaggccggggtgggcggatcacttgaggccaggagttcgagaccagcctggccaacttggcaaaaaccccatctctactaaaaaaacaaaaaacaaacaaaaaaaatgagccaggcatggtggtgcatacctgtaatcttagctactcgggaggctgaggcaggagaattacttgaacccaggaagcagaggttgcagtgagctgagatcacaatactgcactccagcctgggcaacagaacaagactccatctcaaaaatcaaaaaaacaaaacaaaatgatgcctcaaaagtatgatgctgggtgcagcaaaccaccgtggcaaaccatgtaggtaaacatggtacaggtttaccatgtaacaaacctgcacatgtaccctagaactaaaaaaaaaaaaaaaaaaagcagcatgatgccgggcaaaagaagccagatacaagagtatgtgctgtactattctgttgatatgaaatagaaatagtgacaaaaagcagattggtcactgcctagagcaggggctaggaaggcaggttatctactaggcaggagcaggaaagcagctataggtgtggaaacgttctatgtcttttttgggtggagggtggttacatggttgtatacatttgtcaaaatgcatgggtgcattttattttgtaaaaattatgcctcaataagttggaattaaagaaaaaagaaagaaaaaatatttttatgccattgggggtagagaaagttctttttgaataagatataaaaactataaaccacaaaagacaaagagaattctactacattaaaatttacaacttctgcatatcagaagacaccaacctcaatattaaaaaacaacccacaggctgggcacggtggctcacacctataatctcagcactttgggagatcaaggcaggtggatcacctgaggtcagaagttcaagaccaccctggccaacatggtgaaaccccatctctactaaaaatacaaaaattagccaggcgtggttggtgggcacctgtaatcccagctactccggaggctgagacaggagaattgcttgtacctgggaggcgacagagcgaggctttgtcttaaaaaacaaaaacaacaacaacaacaaaaaaaactccgacagactgggagaggatatttacaacccatgtaacaacaacaacaaaagattggtatccagaatattttataaactattatgaagcaatcagaaaaatacaatctaatgaaaaatggctgggatatcactgggcaaatcataagtgaaaaaatcaaatcatccacaagcatgtgagaagatgtcaactcactctcaaccaggaaaatagaaattagaaatggcaaaatgtgatcgtcagataacagactgtgggcagggatgtggggaaatgggatccgttttgtgttcctaatggtagtgtatcttcagagaacaaattgatgaggaatttggcaagagctagggaatttgaagatgcacatccccacatcacctgacatttcttcatttagctatctgccctgcaatgctcaaggttatgtgcaccaggttaggtgctcaacatgtgttgagcactgccttgtttttttgcctttactttgttttttgacacggatctcgttctgtcgcgcagggctacagtgcagtggcgtgatcacggctcactgcagtcttgacctcctgggctcagtgatcctcccacctcagcatcctgagtagctgggactacaggcatgctccaccatgcctggatattttttgtagagacggggtctcatggtgttgcccaggcttgcattgttagccccgaagtgggaatatcctaaatttctaataattgagcaataggtaaaaaaaaaaaaaaaaaaagtatagctatgcaatggaatactatcgaagaatcaaaatgaataaactagatctagatctatatgtatgaacacggtgagatatatatatatatatatatatatatatatatatatatatatatatatatgagagagagccgtatagcaagagagggaatgcgctacagaaggatatataccgcccagaaagagaggtgctcagcaggaccctaagaaagggttcccactgcagccccataaaagggggcagtgttggagcaagtggacagctgaaaactgcctgcaaataaggagtttcccagactctggggtgtctctacagagacccaatccccggctctctgacagcgatgcaggtcttttgaacgcctgggctgctgctgcccgcgcgcctcccccgtggcaataagctatgaacaggcgctcgcaagcgctgcgatcccacaccacctgcgcggtgcagaatgcgagatgagcgagcccacagggcctccagctctgtgccgcatcacagcctcccctgcgtctttcttctctgctaccatcccactcactttggctccacagacttgctttgaggtttggcacttccacatttttaatataaactcagattctgaagactccagcatcaaatccttattttaaaaaaaaaaaaaaagaccccccaaagaaactgacttcctaactttccacctgcccattgttttctaaagaacaggtgtttgagtagcttgtaggtcgtaaccttttatcccaaaaaagaaatctattttctccttcccatgcactctaacctcaacaaacccaaatcagtttggagatggagccctgcttgattttattttatttagagagagggtctcgctctatcacccagactggagtgcagtggcacgatcacagctcactgaagcctccaactcctgggctcaagtgatcctcccaccttggcctcccaagaagctgggactacaggtgtgcaccaccatggctaatttctttattttttgtagagagggggttttgctgtgttgcccaggctagtctctaacactcagcctcaaacgatcttcctgccttgcttggcctcccaaggccttgggattgtaggaacagccaccatgcctggccatgacttctgatctcccttctgagatttggttgtaggaaggtgggggatggatggatgtgtccgaggtctgcctctaaccacatttctttctttttctttttttctttttagatgcagtcttgctctgtttgcccaggctggagtgcagtggcgtgatcttggctcactgcaacccctcaagcgattctcctgcctcagcctcccaagtagctgggattataggtgcccgccaccacacccggctaatttttttgtatttttagtagagatggggtttcaccatattggccaggctggtcttgaactcccgagctcaagtgatctgcccaccttggcctcccaaagtgttgggattacaggcttgagccactgcacccggcctcttaccgtatttctatctgagcctgcctttgcttgtcttcggtgggggaattgagaatccattggtatctgagctggagaggatcaacaaagctgtatgaagcccccttggtacagatcagagaaacctgctgagaaaagagaaccacttccctgccttcccttggaagcccaagtgtttcctgtgcctttcatatccgccctcaaggctggcccatgtggactgcatcaatgtctcccttgcctctgacttttagttggatctggctcctgggattctctggcccaagacgggaatgagagacgatagggaggaaggccctttattccctccagggccaccctccttgaaggtcacagcccagaggggctatcacatggcctttggttttttccccatcccacccacaaccagatttttgtgacagtatccggagagtgaaataaacctgcattgccattttctcagcaatttccgtctcccactccctcttctctaccaatgcactcacagcatctatgtgcagtgccttccacattctagacgctggaaggatgctgccgggagagggttggatgtagtccctgacttcgaagagatgttggtgtgtccagaagagggaggtgcaggcacagagctgccagtgccaacatgagggcagaacttctgaccatctgaccatctaaaaggcagcctctcgggctttcctgtatctctttactagataatctttactaacctttaatagagtaaagattaaatgacaaaggtggccaggagcaatggctcacacctgtaatcctagcactttgggtggccaaggtgggcggatcacttgaggtcaggagttcgagaccagcctggtcaacatggtgaaattccgtctctactgaaaatacagaaattagccggaaatcacttgaaccattggggggggggggtgcagacattgcagtgacctgagattgtgccattgcactccagcctaggcaacagggcgagactccatctcaaaaaaaaaaaaaaaaaaaggccaggcacagtggctcacatctgtaatcccagcactttgggaggctgaggcgggtggatcacctgaggtcaggagttcgagacaagcctggccaacatgctgaaaccccatctctactaaaaatgcaaaaactagctgggtgtggtggtgcacccctgtaatcccagctagtggggaggctgggatgggagaattgcttgaacctgggaggcggaggctgcagtgagctgagatcgtgccactgcactccagcctgggcaacagagcaagaccctatctcaaaacaaacaaaaagattaaacaagaaagatgatcgataataacttggcatttataagtaccatcagtcactcaagattttccaagcacttttcacaggggaggcctgtgctaagtactccagcactgagggcaggtgtacaaggcagggtaccactccttttctgcccttccttgaagagtgcagtcttttgggggaatcaggtgagtgagtggtcaacgtggctgagggatttctggtgagacagcggccagtgggccctggagtgagtgaggaagttcttggaacagcagggatttcactaatgctctcctcctacgtggaaggggctcattgagtccaagtccccaaaaatgcttacagaacaaagtggtttaaaaaaatctaaatcacaactgctggactcttatgtcatctagtgactaaccagttcctgaccaggtatttgaactgctgggaagttgccatcttgaatggatgcctggcagcagccatatcagttttcccaggggaccttgcgagcagctccacacacaggacctgggagtgggcccggggggatggattcaggtcgctttgtaggacagcatgcccagctcttccttcctactaacaatagcaaaacccctcatcaccctcatcacaagccaatctgccaacaagtgttcattcaatagctgctgtctctgcccctgctgttaccccagctgtggtggtcagtggggaggagtgagctgtttgctgagaagaggtgagatggcgagtaatagtagtaataataataacaataataataaagacagtgggccaggcgaggtggctcactcctgtaatcccagcactttgggaggccaaggtgggaggatcacttgagcccaggagttcaataccagcctaggcaacaaaatgagaccctgtctctgaaaacaaataaaaaggtaacgtatcttctaaaattatcttttctagactttgtgtaagactgaaaaaaatgaagccaagcccacaatggctcacacctgtaaccccagcacattgggaggctgaggcaggaggactgcttgagcccaggagttcaagaccagcctgggcaacatagcaagaccccctctctccaataaataaataaattagctgggtgtggttgcatgcatctatagtcccagctacttgggaggccgaggctggaggatcactggaggccaggagttggaggctgcagtgagctctgattgcaccactacactccagcctgggcgacagagtgagaccctgtctctaaaaattaaaaaaagaaaaaagagagagaatgcacaacaaatgttatctgtgtcctaggccagctgagggcttcccatgaatcttctcactaagtccttgctggagccctttgaaggaggcatcagcatcctcaattacagatgaggagactaacagggaaacagcatgtgacctgtccagtgattcaaaagtgccttctccaccgtggtgccagactgacctccgagaagacactgaccagaaggcatagcaaggttgacagctgacgggtgcagctggaggccaggcaggctggagcaggggcctggagaggggatgtggagtggcagggagagcctctgctgaggccttcctgggctaggccagggggtcagggctgcagggggagggtggagagggggaagaggtgggggtggagagagcccaggaggggagcctggcctgcagtggtgcttcaggcagaagcggccctcccaccagcccctttccagtcacataaagctgggtttgtttccatttatctgcttgacttttcagccaagatgctgtttgaaaaacatattgctctaatttaatccacatgtgcacccccaggacagagtctaaagaaagcttccgtcacggccccaaagtctcagcctcatggaggtggtaggggtgggccttgtgggtgaccccaacccacctttaagggcccaccctaaagccagggcccaccctacttctgtcctggacaagcgggtgggggtgttggtgggacaggggactcccaaggtagtgtccatggcccgctccctgcacctgcccacaggggaaggatgcaaagagcaggaggccagtggacacagtgggcatgggcttggggtagggttggtgcatgagggggtttgactttttttttttttttgcaatggagtctcactcagtctgtcgcccaggctgaagtgcagtggcatgatcttggctcactgcaacctccatctcccaggttcaaacaattctcctgcctcagcctcccaagtagccagcactacaggtgtccgccaccatgcctggataatttttttttttttttgagacagagtctcgctctgtccccaggttggagggcagtggcgcaatctcggctcactgcaacctccaccttctgggttcaagtgattctcctgcctcagcctcccgagtggctgaggtacaggtgcatgccatcatacctggctaaatttttgtatttttagtagagataaggtttcaccatattggccaggctggtcttgaactcctgatctcaagtgatccacccacctcagcctcccagtgttaggattacaggtgtaagccacagcgcctgacccagctacctttttttttttttttttttggtatttttagtgaagacagggtattgccatgttggccaggctggtctcaaacccctgacctcaagtgatctgcccaccatggcctcccagagtgttgggatgacaggtgtgagccaccacacctggtcaagggggctttgacttctaatcagttcctttccctcccttcctcagatacagacccaaactctggggcacacagtggtgacataaggcagtttatccaagcatgtggagttgggggagatgctgtctacagggtggaagccaggatgagccaggagcagggctctgagatggggcacaggaccacctacgatctcgcctgagcgcctggctgcatatgaggtgagtttaggaagcttgtctcacagccacaccccactggcaagaagccagcagggagcaaaaccagtatgttcatttcagtattctctcccaagtgtgtgcctgtcacatatcttattttgaatcaaattatgtatattatttggagggattgattgctgaaaatgagaaaagctagaaggacctgtctcacacaggtttattcagaactgagaccagagatacagcactggagcatagaactgaaatgtctgactttgattcagggcctaggacccttctggtgtcctacgagtcaggatcctggtgcactggtccatgcagaaatgacacttctctttccttctagagtcattccctccactccacaactcattgtccgcttggactaggctggattcccaagcaaagaacaatgcaggaggattgcttgagcccaggaattcagaaccagcctgagcaacatagtgagattctgtatctacaaaaaatttttaaaaattagccaggcatggtggtgcacacctgtactcccaactactcaggaggctgaggcaggaggatcacttgagcccaggagttgaaggctgcagtgagctatgatcacaccagcctgggcaacagaatgagaccctgtctttgaaaattaaaaacagaagaaaaaaaatgataatgcacaacgaatgttatctgtgtcctaggcaccatgctaagggcttcccataaattgtctcgtccttgcccgagccctgtggaagaggtgccgacatccctcccatcttacaggagaggaaactgacagtgaaacagcacttgacctgcgtggcgactctgtaacgtatcctctctgctgcggtgctggacggacttaagagaagatgctggccagagggcaccttagaactcctggtttgttctagcccatttttgtgtcgctaaaaaggaagacctgagacctgggtaactgataaagaaaagaggtttatttgcctcacagatctgcaggctgtacaagaagcatggcatcagcacctgcttctggtggggcctcaggaagcttccactcatggcagaaggaaaaagggagctgtgtgtcacatggcaagagagggagcaagagagaggggagagaggtgccaggctcttttaaacagccagatctcgcaggaactcagagcgagaattcactcattcaccaagccattcatgaggaatccatccccatgacccaaacacctcccatcaggcccccactccaacactggggatcacatttcaacatgaggtttggaggggacacacacccaaaccatatcacctgatatttgtagaaatcaatgcctggggcagctccagagtgtctatataagcagcgtacatctgggaccctcagagactccatgcccccttgtgacttctaagaattgaattcaggccaggctcagtggctcacatctgtaatcccagcagttcgggaggctgaggcgagcagatcacttgaggtcaggagttcgaaaacagcctgaccaacatggtgaaaccctgtctctactaaaaatacaaaaaaaagtcaggcatggttggtgcatgcctgcaatcacaactactgaggcatgagaatcacttgaacccaggaggtggatgcagtgagctgagatcacaccactgcactccagcctgggtgacagagtgagactccgtttcaaaaaaaaagaattgagaccccctctgctgggaaggaccaggagcagccctcagagcccatctgggtggcatctcaaaagatgctgctggaaagaaggaatctgggcagattatggggtttctgaaatgcactaatgtatttctatcagaaatggcaaagaagttgaaaatagtatctgagaaggtcagaatggaatgagtttccattgctgcctgctaaccagagaatagctcttgttcatgtctgtgactgggcaggattctcggggctgcctctgccaaaggccgagtatgggggtctctggggtcttacctggaaagctttggaatttcccaggctgcaagatactcccctttgtctcaagacaagagctcagctgtgcagccaggatgcagccatcaggagcttccttgatgctgggaagggcttgggagaccctcctggggcatggccggctccacagatgggcaaaggcagggaggacgtcctgcatttttcaaagatggacatccatgccaggtctgagtggttctggtcctatgggggtatctcctggccaaacctttggtgaaccccacctgagaagccaacaggcacttgcatggcagagacacttagtgagaacccagggtcggcgagcaggcaggcaacagagggctggaacactaggtccacaaatatcagtcctgtgcttgcgggtacctccagaggaggaggccaaagtgaaggcctaggactccacagctcctgctgtggagggagggcaggatgggagttgaaggtagggaggcgcccagatacacaggtccagtagcagatgctggccactacacacaggctccagggaggaaatctggccaacacaacagtagagcacctcttctgtaacctctgcactttgggaagccgaagcatgagaattgcttgaggccaggagtttaagaccagcctgggcaacatagtgagacccccatctctacaaaacatattttttttttttttttttgagacagagtttcactttgtcgctcaggctggagtgaagtggtgcaatcttggctcactgcaacctctgcctcccagattcaagcgattcttgtccctcagcctctccagtagctgggattacaggcatgtgccaccaggcccaactaattttttgtatttttagtagatatgaggttttgccatgttgccccggttggtcttgaactccagagctcaggcaatctgcccattgcagcctcccaaagtgctaggattacaggtgtgagctaccgagcccagccaaaacataaaaaatttaaaacagtttaaaaaaaaagttaaaaaggtttttgttttgttttgttttgttttgtttttttaaagtaaagcacctctttaattgggctgggcatacattttggtttatgagattggtcttttcaacttccagtgaccaattaagatgaaactgcctttcaccattcactcagttgataatggcagcacaaacatgtactaggtccctggctcacatggccaagggtcacaacggctgcccatgttctcctgatggaaacttttttatggctttacaaagatttgatgtgattcttttttccgtgaaggactggggctctcgacacaacgctatacagtaacgctgtaatcttggggcttaatcaaaacatattccaacaacctattctggtgccacgaatgaatgtttattttaaacaatttgctacggcttttttttttttaagagagagaaagaagggaatttcttgaagccaaatttctccctgcccttaagcttgtctctccactcgaaagactgtgtcagacgcccaagtcgtaattaaccacagagctgtttgggagaaagggagaccgagggggtatttgacaaagaattaacagatgtcatttcggcggcggctggcccactgctgctgggccatttgttggatggaagctgattcggctgctgtcgtaaacagagagtagtaataattatatccaggctgcattaagcatagcagattggatgtataacattctgttaaaaaccagctcctctcctgtttctctcgagacacaatggagacgacccccagtccccagttttgaaagccgtctccaaggatcctgacagactttccaatagggaaataggtcatgttctttcgtggctaattctgctgaggttcctgggatggcaaagggatctgctgaaaagcgagttccaggcacacttcagtaaaccagccacaccgcacaccgcagagctgcctttttccatttgaaaaatgaaagaattaaattcaaaacaaacaacttcaatttaacaccaaactacaggataaccaatcttaaaaatgtcacagcgtaatggatcttaatacccatagaaaacacaaaaacaacaccattgttccccagcaaatgcagagcaacctcgcagaatttcagtgaaggagaaagaagggaaaaacaccttattacttccaacccctgcgagccattttggtctccaaaggttttaggctgcctgaggccgtgtgtctgcagtgtttcgggaaatgacttgccttagcacgaacgctgctctgttctgcagcgacgctgcctgcccgggagcggtgccgctccatttctggttaactcttccttcccgggcctgccgctcgcaggagcagtgtgggcagggcccagggacgccactgcaacccagcttcctgcagggcagccggactggcacctctaggagcagcttctccaagaaagtggcttcagcagaacagccagctacccccaccgctctggagaatctgttctcaaaccaagctataaagcgactgtcatcaaaaggcacaacacagctgaaaccaggggacagaatcggggccttgtgggccaatactggccgatccagcctctcagggtgccctgctggggacagcttcccatctctgccacaaaaccaggaaggacactcttctggttagcagggtacaagcggagtccagccggatactagggcacaacttgggcctgaggacatggggtgagggaagcacagggacagaaacgttttcgccacatatctgagctgaaagatgacagagaaccacttagcacttaagaggttaatacaattcctaagtgttcagcaatcatggcaatttagtgccatttcgattattacacaataaacagaccatgttgtctggaagcaaatttttatgagtatagctgaaggggctgcaacttatttagctgtggaaactcgaagggaaagagacttccaaatgctaacaccacggagcagaaacacaggtagcaaagaaaggttattctcaggtcaccgccctggcaagtcaccaccatgaccttcaaaatgagtatatccttagagggaaatcaagttcaccaaagggttctttacacagaaccatttgactgataatattgttgagtttcagcgcaaaagatttgggaatttccagaaacatgttatgttcggcaaaaaaaaacatgatgttaacatgggatggggaatgtatacagggttttggccacttggaatatgcattgaatacaaacacctgcaagacagctcattcatagacacaggtcgctgctgtagcttataggtacttgggtacgatgatcacaaacctgatcaaattcctaatacaacaagaaaatcaaatatgtaaacagaattgtgggagatgctgtaactctcaaaggttctgcaaaattttatggcacactgagctccaagagacacatttttcctttaaggcacacaaaggtttggatttggggaggaggacagccttgccccagctccaccaatggaggaaggaaatcaccccagaggtacttcaagactcaaggttaaaatgtgcatgtgtgcatctatacctttatgtttgtgcatttttaggcttgcacaaggcactcacattcatgaggtgtctggaacaaccaagctgccctctgctgaacaaagcaaagaggttgttatttttacccccattttacagatgagctaactgaggttccacttaggaacctagggccccttcctggggggaattggatagtcttgtagttagcctttgtgcacaaactgcagacccaaagaggttggaggactttctcctcaagggtccctgggacacatggagctggctgtgggtggcagtggagtggagggtgggggcaagataaagctgcaaagacgcaccctgcttccagggtgtgaagagtaatcctgctttgggtagaattgggtgggggctgtgagagcatagcctctgcctggtggcatccacctacccacccatccacctacccatccatccatctactcaatcatccatccatctatccatccatccatccatccacccatccatccacatacccacccatctacctacctacccacacattcacccatccatccatccacccacccatccatccacatacccacccatctacctacctacccacacattcacccatccatccatccacccacccatccatccacatacccacccatctacctacccacccacccattcacccatccatccatccacccatcctcaacctcatgttgaggagggctgggctggatcctggggctgccatggctaatgcagacagcaaaaacgtctcagctgccaagatcaagtaagactttctaccccatctccaatataccagcctgcctaactcctgaaagcttacctgtagaaaagcaatgatctcaaacagtggaatgcacaagagttaactggggtgcctattgaaaatgtacatttctgattcagtaggtctgcggtgctggggcagagctcatggactcaaatgaatagggaactcaggtgattctctctctctctctctctttttattttttttattttggagacagagtcttgctctgtcacccaggctaaagtgcagtggcatgatctcggctcactacagcctctacctcccaggttcaagcaattatctttgcctcagcctcctaagtagctgggattacaggtgcccaccaccacacctggctaatttttgtatttttagtaaagacaaggtttcgccatgttggccaggctggtctcaaactcctgacctcaggttatccgcctgcctcagcctcccagagtgttaggattacagacgtgagccactgtgcccagcttcaactcaggtgattctcaaaacaggtagtcagaagagcacaccttgagaaaccttgattttgggtcacatttctctgtgcaaagtagtcttcttaggtctttcaaaaatgctatgttcctcggaggtgcagcatatttagttcttaacaggaatttataagatactggtgaccaccctccagtctgttcatccatccacccacccatccacccattcttcctcccacccacctacccacccatctacctatccatccgtccattcgtctatccacctacccacccacccatccatccacccattcacatatccacccacccattcacccactgtatcagtccattcttatgctgcaatgaagaaatacctgagactgggtaatttaaaaagaaaagagatttaattgactcacagttctgcttggctgggaaggcctcaggaaacttacaatcatggcgggaggggaagcaaatatgtccttctttacaaggcagcaggagagaaaactgccaagcaagcaggggaaaaacccttataaaaccatcagatcccgtgagaactcactcactatcacaagaacagcatgggggtaaccgcccccatgattcaattgcctcccattgggtccctcccatgacaggtggggattatgggaactacaattcaaaatgagatttgggtggggacacagcaaaactatattgcccacctacccacctgcccacccatccacccatttacctgtccactcattcactgctctatttatccatccacctacccacccatccatccacccattcacccacctacccacccacccatccatccactcatttgcccatccagtcattccactgaaccacccactcacccatccactcacctacccatccatccacctacccatccatccacctacccacccatccacctactcatccatccatccatccatccatccatccacccacccatccatccatccacccacccacccatccatccactcatttgcccatccacccatccactcaaccacccactcacccatccattcacctacccatccatccacctacccacccatccacctactcatccatccatccatccatccatccgtccatccatccacccacccatccatccatccacccatccacccatccacccacccatccatccatccttccatccatccacccacccatccatccatccacccatccacccatccacccacccatccacccatttatcctcctacccatttatccattcatccatgcttctgtgcaacagatctttcctggacactgattccatgaaaagccatgttctaggtgccggaatggtagaagaggtcccagcaggcagatgaaggggcagaccctaaagggagctggtgactcagagaggggacaccactgtgggatgcccagaggtagatggcttcatcacagtggtacacactcctggccatagccttagggtcccacaagcagatgtgacggatggcttacagcacattttgggccctgagggcacgaatcatctgaaagggccaaattcttttcccctcagaaagaaaaatataactcatgactgctacatggtgagaaagaggaagaggtctggacatgaaggaagaacagaaatagaaggagaatgacaatggcagccacaaagagcatgcagataaaaacacctgaggcttctttagagacccaggcaaggcctattgagagcccagagccaccgggcttagagcttttgtgtccccatgctcagtcttgatttggaattctcttggaaacattgtttataattggccattcagaacaaccttagtgcttataaagctgtcacccatgtggtccagtctcaggtcagtgtctcagacaaagaacctgaatccatcagcttaaatgtaatttcaaagtcagacaagttcaatcctgccatttctcaaacactctgaaggagatacaagatcacaagtgctgcatcttaaacctgtcccttctctcctgcctcttgtctggaaggctgcagttgctggtcttttcaacactccgcagcactcttcccaggtctctccctcttgaccctgaccttccctccctcccctttgtttccaatcctgctgcacacaaaccccaaaagggctggccttgttggccaaggagggtagtgactgggtgagtgtgagccccttggacttcttatctgaaaagtggagactatactatgacctcatgggtttgtgatccattaaatgaaagaatataaataaaacatttagcctgtaatcccaacactttgggaggctgaggagagaggatggtttaagcccaggagtttgagaccagcctgggcaacatggcgaaaccatatctctaccaaaaatacaaaaattagctgggtatggtggcatgtgcctgtagtcccaactacttgggaggctgaggtgggaggatggcttgagcccaggagaaggaggttgcagtgagctgagatcatgccattgcactcaagcctgggttacagaaccagaccccgtctcaaaaaaaaaaaaagaaaaagaaaaaagaaaagaaattaatgaaggcatcaggcatcagtacatggtagacaattaatgaatatcactgttctcacgggaaaacctaaaatagggaggaaatcacagattttattatttcagaatttattatttcatatgggatgattctatatcttacaaaaataaatgtataacttttggagaatgtttgtctaatttacggcaaggagaagtggagtgtaaagttagtattatgcaacattttccccagataattcccgtattgatattctaatgaaaataggctccccaaattctgcatttttatcgtgtgtgtctatgctagcatttatgttatattctgaattaacaaacttcaaacgctaaaaaattacatatgcagaaaaatagggaaaagggatatgcatcttttgtaagtctcagtggagcgcaggcaaacctctagccctatctgatactcctagcttaaaccacatggtagttttggaatgggagaacattaatgactacaaaacaataagaaggctgtttagacatgtgcaaaaaaaaaaaaaaaaaaggaaatctttaaaatcaggctgtgtctttatcattgaatgcctactaatgaatatcattctcaataaagaaacttctggctctctcatgttctgtttgttaaaatagcatccaagacattttctataacgcaaacttaatgcaaacccaaaacaaaataaaaaggaaagaatgtcaaaagaacaaacttttaaaactctgcactttttttttattattagatgctattcctgacttgttaaaattgatcaaatagaaagctgtgaaaagagaaaaaattaagccaactagaaaagtgtgacttggatttaatattttataattgccaagggacatactgagatcaatgaatttttgcctgaaatgaacgtcagaaagagatgtacttcagtcttttagggaacattggtctatttaattcttgtgtctgatgcatgtgaaataggcctgcctcggccttctttctctgccgggggtgttgctggcagcggacattaccacttttaataggccgctgtctgaggagtggcaagggagcccataacccatcgactctaatggatcagcctgtttattcacttacaccttttttttttcccagctaattttagttttgcatgctgagttgtttcgctttgaattaaatgaatagaaacaaagggaaaagcctgtgcagctaataaaccatgatgatgttcacggccctctcaacaggcttctccacatagcaggtatcccatctgagaacagattcactgtggcattttctccacttgttgacgaaattaacattttatacatgctcacattcagaggaaaaaaattaaattattcaaattgcttgatcgagaatgcaccgttgtttggagtagacctacgcgcccagcctcaggccaccgacatcctcagatttcagacaccggtcagtgactttttctgcctgggggggtcatcccacagctctccgtggggtcacacaaacaggaaaaatgccccagtgctttgctttgtctaatgaaaaaccagagagacacaaggaggctatgtcagcgtgcccttcaacagaaataacaggagtcagtggtttaaaaacatccccctcccaaactccctctctatgcccagagaacttgaagaaggttccagaaaccttttaggtcgatagctgccaaggggtatgagagagacaagaatgtccaatataagagagaggggaaaggggtcagcttccccttatcttctgaataggacccattttccatttggggtttggaattgtcacaaagaccccaatggcagaggagggggctgcacccgcctcttccccattgagaactcacaccgattccctgtggtccctgcaggttagaggggctaccatgtccccaccaccggtaaagcctaggaagggggctagtggcctgaactccagaaaaggcattctccacttgtgggagaaacaatattccccaaaagaccaccccaggaggtggagatgagaggatcgcttgaacccaggcattggaggctgcagtgagctgtgatcaccactgtgctccagcctgggcaacagagcaagacccagtctcgaaaaaaaaaaaagaaagaaagaaagaaaaagaaaaaaaagaaccactccaaaagattcaccctccaaacagttcaactccaaaggttactgccctaagggtggtgccatacggcatggctgtgttgtctcctggcaaaaaaaaaaaaaaaaaaaaattaaataaagttgttgctcaatcagaagctaagataacttgcaaagtgatctggaaaatattgagagaatttagactagctgggagaaatagaacatgctctgtcattaaatcaaataaaaataaaaataggtctctctgagtattaagcagaatgtcaacaactctctgaatgaaatctattttagacacaacaatagtatgataccctacttttgccctcatgcaattaaaatagggtaattttttagaccatttcttgcagctataatctgtcactaggagaagaaagcccttagcaccccagctgtatccagtttcacacatggcttttctttcctttctaccccacaaatctcaataaaccagaagtcagtcagctcaaactcctcagccctgcctttttaggactcacattccttagctgtgctttcttccctcaaaaccccaagtcacccaaatagcattttctccattcagcagcattttttttcttttcttttccttttttttttttttttctctgagacagagttttgctcttgttgcctgggctggagtgcaatggcatgatctcggctcactgcaacctctgcctcctgggttcaagcgattctcctgtctcagcctcctgagtagctggattacaggtgcatgccaccacacccgactagtatttgtatttttagtagagatgagttttcatcatattggtcaggctggtctcaaactcctgacctcaggtgatctacttgccttggcctcccaaagtgctgggattacaggtgtgagccaccgcacccgaccattcagcagcatttcttatacaaatatgcactgactcctaccatgtgcaaagcactgaacctgatgtttaatcattggcatggagctaagtaatgcacatttcttttttcttttcttttttttttcttttttttttttgagacagagtctcactctgtcacccaggctatagtgcagtggtgtgatcttgacacactgcaatctctacctcccagattcaagggattctcatgcctcagcctcctgagtagctgggattacaggcatgcaccaccacgccaggctagtttttgtatttttagtagaagtgagatttcactatgttggccaggatggtctcgaactcctggcctcaagcgatccacccaccttggccacccaaagtgctgggattagaggtgtaagccactgcgcctggccacacatttctatttgttaaagaatgaagaaatgtagtgggtagggtccctagcggaactccctgcacagtgtccttcaacccagagcctaacaggctctctctcatcaatacgcaagttacaataaaataattgatgggcccacaatgcatgcccacaggatggccgtgagcaagaaactctcaccgtgcaagaaaccatacagtcacagaataattctgcttcccctcgatttgtgtgcctggacccagatccccgctctcagacccagtgtgcaaagcagagagggaacaacagactcgagttggaagtgatttacttcattagctgggattacaagtttaacttacaaaccagaggtcaaaatttctcattaacaagggggccgtgaatcgctgcaggctttggttcaagaggagaccactcttattactaactacacatttcaatctgtctttgatgttctccttcttccctcctcccttttattttttggcagaggagctgattttaattgtggcactacaaccaggctccctccatcccagggagcagcctcccgtctgctgctgcctggcgagtgagtttgcaagattgggtgcagtctatcgctcagggcacattttaatggctcccctctcctacaaggcttggattgttttccacgtgattctggttaatttcgctgcgggaaagggcattggttttccttgtgagcttctgatcagtctgcctcagagaggtgaaatagattaaaacagagaaggaggcgttgtcattccaactttccggacgcgaggaccagacccagcacatctccagcactcagaatagagagaggagtttgacagagaccgttatgctacaaaaagcgctcttttgagaaatcagctttggttgtttacaaaatactcaggttgccttcaagtgccccttcccttcaaaaccaccaccaagggttaaaagaagcaactcaaacgagataaaacttctgcagggtgcacttatcctgagaatctcagaatcccacactgcagaatccttttccaaataagaagaccaggaaattgtagcagcagttatgtattattgtccagcacaaataaaagtgcttaacacgcactgttctaaagaccaagacccgcgtgcaggtcacagtggcacaatgaccaatgtcactgaaccagggcttcaaatggagtcactgatggaaaggattccactatctaattatttagaagtatagagtatagccattattgaaaataactaaattgttattccggtctagtctgggaagaaggtcacattcaaaccgcataagctctaaatattcctcagttgctattcatgcgctgtgaatgtttgttctccctgagaaatgttttcttagttgccgggtgaagagcccgtaggtagcacagaggctgtggatggggctcagtgcctagtgcccatcagagagcctactaagctgaccccattgcagagagtagaggcagcttccagcaaccgggctggcctgctcggctgcacgggactcccagcatgttccaggtgtggcagcttgctgtggaagccacggtgccagggggacaaaaactccttgtgcaggaccagcacagtggctcatgcctgtaatcccagcagtttgggaggctgaggccagaggatcccttgagcccagaagttcaagaccagcctgggaaacatagggggaccctgtctttacaaaaaataaaaaacaaacaaacaaaaaattgtccaggtgtggtggcgtgcacctgtagtcccagctactcaggaagctggagtgggaggattgcttgagcccagaaggtccaggaggttgaggctactatgagctgtgatcacaccactgccctccagcctgggtgacagagcaaggccctgtctcaaaacaaaacaaaacaaaacaaaaaacccaaaaccacaactcctcatgcaaaacaagcaggggtggctgcagtgtcctgcccagttcccatccggaacccccaggggaagcagggggcttctcatccatggagaaattactgccttctttgctttattttattattattattattttgctgctaatgtttagttttagttccttttatgtctccagttccctttaacaaaaacactgattagaactcaaggaatccatgtgacctggaggtgaagagcagttctcagctggggacaatcatcaggctcagacccaggaagcaccagtggctccgggtcacaggggcccgaggcaacccggccatctgggccctcagccacttcctggcgccacccgaggcaccccaggccaagccaggcagtcaccttgaccgggctgctggggcgtctcacccgcgcactgtccctccctgttcccaccccctccctggcaggcagctgttcagctccaacaggggcctatcttaacaacgagacattttagaaaggtccttattgctggtctaatttcaaacaggcaccacaatgaagaactgtctttgtatgggattaattttaaaacctcaggatttgatgtcagtgggaaaaacacagtgtgggggtcaaactgctgccttctcctccttctggccagcccaggggctcatttcttaggagatgaaaactctgacaagcccttcagtcaagctgaaagcaggcagcggtccagccacagccacaggcctcccgggcatcctgtgacccctccgaaaagtcacattcactttgctcttgagaaaggaaaaatcatgctggaggcattttatttgaaaccatgtgaaataaggaaatgtgaagatgtgaaaatgaagtgaaaaaaaagttagaattcatttccgtccttgcaatggcttagaagccgagctggttcattttgaaagcgtgtaaaaatctgatccattcaccagtaggcagagactacaaaatgcttaaggtaaaatatgtaaatatgtaaaattatctgttgaaaaccatctccttttgtgcttgaaagaattttttaaagcatctttatttctattctgcattaatatactattgagcagaaaagtttcttttggcaaaacaacaaaaaaccaagatgccagaaaatttagtgattctgaaatgaagtccatgggaacaaaggaaggacaaaaaggatttctatcttctcgtgcacttgtatggcactttttttgtgtgataatttaaagcatatcattaatataacaaattatagaattcattttttaaaagcattgttcacctgaaaacttgaagcgaacctcaccttcaggcctctgctactgtctcttttggaagtgggctccctcttctccccgggtgtcccctgcctcacctgacccagcccccgctatccttgatagatccagggacctcccagcagtgtgtttggacccataccacaaataattggtcacaaacagtttatcttatttctagatatttccaaattaatttttttgaaatatggaaaagaatggccggatatatgcctatagctatgtaattatcattcattcagttggatttgaatccattgtattgcaacaaacgtggtttcatcacacaacttgcaacttccagaaataggggggttagtggttgttgttttttcctttcccctaatccaatttcttctggagggggttcaaccaatgaatgttttgtctcataagccaacacctcgtaggtagattgctgtcatttcttgtctcctcctgagggagacctatcactgtggactgggcctccagccccactggccagggttggagggatgagcctcagattgggaaggggtgtgcctgaaaccaaatccactgagctctcaagccagatgaacaaaaccctcagatcctggaggggaagacagtgtctatacttggccctgtacgtatggcagcagcattgtttggggaaggtgaaggtgcttaaaactggaaaattgttcttggttttgcaaacccttgggtgttttctgaaagatcagacaatggaaagtagaaagctttctctaaaacaattttcaaatctgtttattctactagacaccctcgtattcctagcgcttgtttctacgttttcttttgtttaaatctcttattgtctcaaaaaggttatcaaaaaataaaaataaaaaaacgcatgtgcacacacacacacacacacacacacacacacacacacacaagattgtgtccagaagactttccaagggctgggagtggtagctcacacctgtaatcccagcactttgggaggcagaggcaggaggatcgtttgaagtcagcagtttgagaccagcttggcccacatggtgaaaccccgtctctactaaaaatacaaaaaaattagctgggcatggtgatgtgcacctgtaatctcagctactcaggaggctgaggcaggaaaatcatttgagcctgggaggcggaggttgcagtgagctgagatcacaccactgcactccagcctggctgacagagtaagactccgtctcaaaaaaaaaaaaaaaaaaaaaagacagttttcccagctcatccccacaaaacctacctcccagctcccttcctgtagacctaggcagagagagaccagctctagagaactcaggaaaggtaatgttagaaacctgagaactgacagggtcaggaagatagcctgagcagcaagaagtatggtctagtatggtgaaattttgttcatcttagatttttttttgcattagtttttatttttaaaatattgcattaaaatagtatctatttattactgggttattgggcacctccttaaagcctgccctcaggcaagtgcttcactgccatcatcctggtcctggccttgccctggggaagagatgcctgctgacatccgcttcagcttcgccaggctccagcctggaccagctaacatggctgtggaggagccacttctctcaacacccctctgttagggaggaggagacaacttcttttattttgttttatttatgtatttatttttattttttattttttatttttattttttgagatggagtcttactctgtcacccaggctggagtgcagtggtacgatctcagctcactgcaagctccgcctcccgggttcatgccattctcctgcctcagcctccggagtagctgggactacaggcgcctgccaccacgttcagctaattttttgtatttttagtagaaacggggtttcaccgtgttagccaggatggtctcgatcttctgacctcgtgatctcgtgatccgcctgcctcggcctcccaaagtgctgggattacaggagtgagccagcgcgcccggcctatttatttatttatttattttttgagaagagggtcttgctatattgcccaggtaggtctcaaactcctgggctcaagctatcctcctgcctctgcctccctagaaacaacttctttactggccattggcaagccaagttcattgaagtctccctcctaaacctttacaaagatttaggaaacagattaacaataaaacttcaacaaacccaggatgggagagttactgaattaaattagagcttttctcgtacatcacgctaaaggtaaattattttgtttattcgaagccacattcatattataaaatggtttgcttctctctctctgtctctctcaaagagatgaggtctcactgtgtcacccaggctggagtatagtggtataatcacagctcactgcagcctccaactcctgggctcaagagaacctcccacttcagcctcctaagctgttaggactacaggtgcacatcactacctcttgctaatttttttaattttttgttgagacaggattccgctatgttgcccaggcaggtctggaactcctggcctcaagcgatcctcccaccttgacctcccaaagcactgggattacagatgtgagtcaccacacccagctggtttgctgttctgataaaggtcttgaaaagacaagaggagatgtattttattggcatcattatcactaactagcaccattgcttactgaatgccatgcatggagctgagagctctacaatatacattattttgcttagtctccagcaactgcaatggcaaatttgaggctgcacaaagatacacatgctggcctcagggctgagccgggatgtgaagtcagatcagactccagagcccacatgccatggagccttggagacaggtttgctttcactctgttatcttgcacaggcctaactctgggcagggatgctgagcccagggctgaggcttggccaggcggctgcaatcgcagatcaaccctgtaagcctgaggacccgcagcttccgtgggaaggtacagacctcctgccctgctgcacagccctgggcagagcaggcatgcccaggaccacactccacttcctccggatggtgccttcagtggagtcagcggcaggaccactgatttttcattctaggtccctatgcaaaaataataaagacttcctgtctgagcactagggtaaacagatcttagctaaagggaggaggaggggttgtgggaagaacctctgttgtcccagctggaaacttaagcaccaggaaatgcatttccgcgtgttcccagcctgccgaaaagtcaggcacaccaaggacaaagcaatctccaatgcctggcccaaatttggcttttccccttccccgcctgctcctccaggcttcctgggtttttcactctcctccgtttcccctctgggcaagcccagagggtgtttgtttaaagtacctttcgctaacattccttcccagccattctcacagcttttcactttgcattacgcccagagcccctagatgcagtctctttacccagccaaccctctttcaaaaactaacctatattttacatggagaactttaacccgtttgcctccaaaaaaccctgtaacattacagagacgctaaagtctccttggacctctaaaaatccatggctacccacttcagctccccaacaggtaagcactgaagcactgactttggaatttttttttcagaaatgtttcctgtttttgcaacatacattggacttcattaaaactatggcatgtgaatttttttatttttatttttatttttgagacggagtctcgctctgtctcccaggctggggtgcagtggtacgatctcggctcactgcaagctccacctcccaggttcaagcgattctcccgcctccgactcctgactagctaggacgacaggcacccgccaccatgcccagctaatttttgtatttttagtagagacgggatttcatcatgttggccaggctggtcttgaactcctggcctcaagagatctgcccacctcggccacccaaagtgctcagattacaggcgtgagccactgtgcccggccgaggcatgcgaaatgttattgatgagtttggttactttttttacatatatactgttctacgcatttttttttcactcaacaatacctcttaaagatctatttgcatacacacagatccaagtcacttaaaaaaattttttgtataaagccccatgctgtgaactgcttctatctactgaggcattttgatattgatgggcatttaggcttctgctatttccaatgctgcttcagagacgctttctttgtgcacatatacatttctcgagggtagataacacagaagggaaattgctgggtttcacggtatgcacatttctagctctgagggcatccaaagtgcagctgtactgatacacggggcaccagcatcctctgggagcagcgcccttacaggcctgctagtacctatcggacttttaaattgctgcccttgtgatgggtgacaagtgttgcttaatttgtatttcccttaagatttggtagggtcaaacttttttttttggtaatacattttacaagtcctttttcatacctcttctgtgaattgcctgttcatattctttgcccctaaaaaaaaaattgagtagtttgtctttaaaaaaaaaaaaacactttatggatctatgattgacatataaaaagctgtacatactgatgcatacaacttgatgggatactatacacagccatgaaaccatcaccactatcaaagccataaatatatccatcacctcccaaagattctcccattccctttatttatttatttatttatttagagccagggtctttttttgtcacccaggctggagtgcagtggcacaatcacagctcattgcagcctcaacctcctgggctcaatcaatcctccatcctcagcttcccaagtagctgggactattgcttttgagacggagtcttgctctgacgccaggctggagtgcagtggtgtgatctcagctcattgcaacctccacctcctgggttcaagtgattctcctgcctcagcctcccaagtagctgggactacaggcgcacgccaccacaccgagctaatttttgtatttttaatagagacggggtttcccatgttggccaggatggtctcgatctcttgacctcatgatccgcccgccttggcctcccaaagtgctgggattataggcatgagcctccgcacccggccaggatctccttttttaaggctgaattgtattccatcgtgtatacaccacattttctttattcattcatccatcaatggacagttaggttgtttccatatcttggctattgtgaattgtgctgcaatggacatgagagtgtaagtatctttttgagatactcagcattgctggatcatatagtagttctgtttttatttgttccagtaaccttcacactggtttccatgatggctgcaccaatttacattcccaccaacagtgcaccagtgttcttttctccacatccttgccagcacttattgccttttttaaatttatttatttaaataatagcgatccgagccaggtgcagtgactcatgcctgtaatcgcagcactttgggagtctgaagtggatggatcacctgaggtcagatgttcaagaccagcctggccaacttggtgaaaccccgtctctactaaaaatacaaaaactcgcctgttgtggtggcgcatgtctgtaaacccagctacttgggaggctgaggcaggagaatcacttgaaccgggaggcggaggttgcagtgagccgagatcatgccactgtactccagcctgggcgacagagtgggactccatctcaaataataataataatatccatcctaacaggtgtgaggagatacctcattgtggttttgatttgcactgcctggtggttagtgatgtgtactttttcatgcacctattgtatgtctcgtttctcttttcaaaccattgctgcttccctgcttaggcacacacaggtgctggggacatgtgggatctcaaaccacctaattcactttggagatgggtgtaggctgcagcagctgcaggctaccctgtgaacgcacagagctctgcagccgcaaacgggctggcctcctcactggccttggcctgacatgtgatgctctgagggactccacctgcaggagcctccacagtgagtgcctgctttacgcaagtcctaaacaagcacaattgccacttcctttaaccccacgatgctgacagatgccaacacctggttccaagagttgccccaaacctcccagtggggccttgggaagactgggatttgaattcagatcagcctgtctgcagtgcccatgaccctggctgagctgagccgggttgctcccggacgctgaggagcgtgtgggtgagtgtgggcagggcctggcctcagggccctgtacccttaggcaacacccatgctctccctaccaggtcggtgccctggttcatcccctgagcctctggaggcagagtactagggagctgggcttctcagtgaggggaaccttcccattcccccctcctcacagctcccacctcagaggatgctgggtaacaggagcacacacagagtgtcccccaacccccaccagctgagaaaaccttggtgaaggccagaggcccacgcaccctgggtgctcctgccccaagaggagagagagagagagagagttgggggagggattcctgcaggtgaacagatcaaattttggtcaaattccaataaattctcacttaattttaacatttaatgttgaaaaatcctaatggtgacctgattccctcttttgaattccagccctcccagataacctatctctcgaggtgacaagccggtgccacctgaattcattactgcctgattaattatgctgcctttgtaccagggaaacagggacttcaatcagccgtggccgccatcccctggccgtcgcctcaacaggccggccgctgtcagggagcctggcccctcgcccagctcagggttggccgagaagctgggcgcagtggctggtgagatgtggctgcctgcaatcagagggcctgggatttggggtcctttctgggcagtcaagggagagaggggtgagccaggtcagaggctgcagagtggagatttctgctctgtccctggagaggcctgactgggaggccctccttggggccttgagctgtctggacataccagacgtcactaaaactgggcattgtcccttcaggaggaggcaccaggtctcagaaggagctatttcaagcacatgcatcccgtgagatacatgattactttggcaaaggggaaggttttctggccagctacctagacccgtgtgtgggcacagccctcacagacatctctgcggagcttcaacatggtgtcagggagggtcaactccaggcactgaggccaggcaagaaccagcaccctcagctctgctggttcattagcctgacggggtatggctacagtggcctttggtcctgtgcatcctgcatttgtcaaggtccacaaacttgtgaaacccagtcccatctgcagagtggcagatgatgtatttttttcaaagaagaagaagatgagattgcttttaaaatgtgggttctctgcccctactctgagcctacacagcatggggggaccacagaaggggtaccccctagcccaagtgccccatgagccttggcctcagcaggtccggctttgaatcctactccgtcatggatgtactgtgtgactatggccaagttactcaacctctctgagtctgggttttcagagagacatcactatgtgtcccacagggtggttatgagagaaaaataaggaaacacacacaaagccctttatgttgcccggagtgccttctgacatgggccagcttcacacagctgctgtggtgacactttgtctggggtgaacagtcaaaagggcagggttggtttcattacttggctgtgtgtgaacacatcatctgggactgaacccatccttgacccccgtccccccgtgaagcttcagcccctgggagaacatgtattcttgtgtttttttggttcttggcggagggtgggagggttgtttttctgttttttggtttgtcttttgtttttgtttttttttgaggcggagtctcactctgttgccaggctggagcgcaatggcaccatctcggctcactgcaacctccacctcctgggttcaagcgattctcctgcctcagcctcccaggtagctgggactacaagcatgtgccaccatgcccggctaattttttttttgtatttttgatagagatggggtttcactgtattagccaggatggtcttgatctcctgacctcgtgagccacccgcctcagcctcccaaagtgctgggattacaggcgtgagccactgcgccatgttcccccaccccgcccgccttttttttttttgagaccaagtctcactctgttgtcacccaggctggagtgcagtcgtgtgatctcagcttactgcaacctccgcctcctgagttcaagcaattctcctgcctcggcctcccaagcagctgggattacaggtgtgcaccaccacgcccagctaatttttgtattttaagtagagacagggtttggccaggcctgatcatgttggccaggctggtctcaaactcctgacctcaggtgatccacctgccttggcctcccgaagttctgggattacaggcacaagcctccgcacctagtcgagaacatgtatttttactgagcgattttgcaaaaccccatttctaggccacaacagggccatccacaccaccagctctgctgcagtgccccacccaagcggcccttcctccaggcttgacttggcctccttctaagccacctggcaggtgcgatcagagaggcctgtcccacagggcaggaagggagaacacaggttccaagaaggcctaggacagttgctcgtgttctggggtgtaagtgggcaatgtgtgtgcagagggaaggcagggaagccatggggagtccggcagtggttcctggacacaggtaaatgggagaggggacattgccaatcagaagtcaagaccagagttcagtcaagggaaaagtctgagtccaggctgtttggaaatggtcgtaagtccagcacaagaaatcttcagcccatgggaagtcctggggcttgggctggtgtccatggtgcagatcccggggtgcagaagcagagtcagagcagggctgaggcgtctaaacctccattcggagccctgacttcacctagagcacacagggtgaggtcctgccagacactggtggctgggtcccagaaagaaagttctagttagtacctgaagtctcctgaggataggagggaggtggctggggcagggaggctgaggtacatatacccaacagaaaatggggcaatggcgtctgtaaaatctctttagcagctgaacctacatggttcaaactttagaggtttaaaaagaagcaaatttggaaggctataaaagatacacaggccacttaatcaatggcttcaccttcaagtgggggcagtagccaccttctttggattccaggtgcctagtccaagttccttggaggggaatcttccctccccaccccctaccccactgagctccctggggaaacagcatgaagcccactggagggccatttttctcagtaggggaggttagcactctcctggtgcccagatgtgactctgccaaaaggcttctgaaaaagacaggacaaaaagcagacagcggggcaggggctcctactcactacccctttaaagtcataatatatggccaggcgtgttggctcatacctgcaatcccagcactttagaaggctgaggcaggtggatcacttgaggtcaggagttcaagaccagcctggccaacatggtgaaaccccacatctactaaagatacaaaaattagctgagtgtggtggtgcatgcttgtaatcacagctactctggatgctgagacagaagaatcgcttgaacctgggagacagaggttgctgtgagctgagatcacaacactacactgcagcctaggtgacagagcaacatcctttctcaaaaaaaaaaaaaaaattataagatgcccattacactggtaagagattaaaggatttgcccaaaggcaaaaacccaactgctatgtactgaattgtgttcccctaaaattcatacattgaagacccccccaacccccaacatgatggcatttggagacagagattttgggaggtaattaggtttggatgaggtcatgagagtggggcctcatgatgggattagtgcccttagaagaggaaataccagagagctctctgccatgtgaggataaaggaagaaggcagctgtctgcatgcccgggagggagccctcacccgaatctgactgtgctgcattctgatcttgaacttcccagcctctagaacttctgtgatttaagccacccaggctttggtattttattatggcagcccaagccaactaagacaccaatgagccgtcttctcttctctcttctccctgtgtagctgtggagtcacattgttggccaagtggatcaggagaataccttgctccagccaaagaagccattttacatagacaccagttcctaatgagtatgtgaaccttccagaaactgtcaagggaaagccaggatcgtaatggccagaggatcccccacaaggaccaaggccttctgccaccttcccctgctcatcctatcacccgccaggagatgaaaggctggtgccgagtctgcaggcagggggccacagggtgagcaaggggtggggcaggctccagctttgaaccctacctaggccatctctacccatcaggagagcagacacagagcctgaaatgtgttcccctggtctccccaaatgccacccccaagcccaggagctccacaagtggggaagaagatctctaggaagcccacctctcagctgcctagtatgctgggaagagcagtaggccaagagtcaaaagacatggcatctgtaggtcacctcctcaatgtgtaagctgggatctcagggcaagttacttcacctcctggtggcttaatttctaatctctagtgtatcaacactcccgaattgggtgattatagagatcaatgaaatcaaaaataataggggcttggctggatgtggtggctcatgcctgtaatcccagcattttgggaggcagagatgggtggatcacttgagctcaggagtttgagaccagcctgtccaacgtaatgaaaccccatctctactaaaaatacaaaaattagccaggtgtggtggctggtgcctgtagtcccagctactcaggaggctgaggcaggagaattgtttgaacccagggggtggaggttgcagtgagccgagatggtgccactgcactccagcctgggggacagagcgagactctgtctaaataataataataataataataatagctctctaaaggtgcattccctttccccttccctcttttttctttctttctttctttttcttttctttttctttttctttttttttttttttttttgagacggagtatcactctgtcatcacccaggctggagtgcagtggtataatcatacctcactgtagccttgaactcctgggctcaagccatttttctgcctcagcctcccgagtagctgggactacaggtgtgtgccaccatacctggctaatttttagcttcttgtagagattggggtcacatcacattgcccaggctggtcttgaactcctggcctcaagtgatcctccttcctcagcctcccaaagtcatgggattacaggcgtgagccaccgcatgtggcctgttagctcttaattttgtaagtatttcacaaagatcaataactaggaagaaaaatcttccccactcacttttttttttttttaagatgaattagtattttggaaagaatatgggcctaaagtcaggggaaaaaaaacaagctaagtagaatagttcctgctactacctaagatctcaggcaagtgaactgttttcttcaaagcttcaatttcttcatctaaaatatgagggaatgaatcctaccttgtaatgtggctgtgaagaacaagatgttactaggtcaagtgctttaaataagggcctggaagagaatggtaacagttacagtagcttattaaatgaatctgcagatggagataagaatgacgcctaactcttgatgttataaagattcccagagttgtaaacttgtaaactgtttagcagagtcccctctcattttcaactgttaagcagtttttcaaaggaaaatagagtttcagccatccagttgtaggggtactactactttataattacatgaaaatcatatttttcatctatgagcaaggggtttatcatctgaaaattttaatgatgaaggcatctattttacaatctctgcagaattatctgctttctctcccagtgtgctaaagattactccattagtgagattcatggctaagatttctcttctgagtcaaacatcataacttcaaggcaacaacaacaaaaaaacatttctctggacaaaaaggtctcttttgactaaggtaaggtatgatgatggttttgctctcaggggtttgctggccttcctcaggaagttttcttttcttttcttttcttttcttttttttctttttttaatggagtctccctttgtcacccaggctggagtgcagtggtgcgatcttggctcactgcaacctctgcctcccgggttcaagcgattctcatgcctcagcctcccgagtagctgggattacaggcacccgtcactgcacccagataatttttatatttttagtagaaatggggtttcaccatgttggccaggctggtctcgaactcctgacctcaggtgatccgcccaccttggcctctcaaagtgctgggattacaggcatgagccaccgtgcccagcctcttttttctttttttaaatagatatgatatcttgctgtgttgcccaggctgatgttgaactcctgggctcaaatgatcctctcaccttagcccccaaagtgctgggattataggtgtgagccacggcccccagcctctgcagtaatttttttaatcaggaagaaaatgaggctgtccacagcctctcaaagactccttccctgagaggggagaggcagtagtgcaagttcattcctcaatgctaagcaaagagagtcttattcccgaatgttatttgattcatgattcaagctaaatggggtatgaaactaaaggtggatcctctccaaatacccacaggtgacatggtccaggtacagccaactcctagggaaaggtgtctggaaaagggataccacactgaggttctcacacaggcagcttcctcagctgagaggggacacagaggtgttcaagggaaaggctacctgctgaagaggaagagaagccttggcagggggcacccctgatctcccagacaacagattctggtgtcacagattgtcactccctggccgattcctgaaccaggcccaacgaactgtccttacctctgcatccactcccagcgccccactgcaatgccgtgcacacgctctgcccttctgcatccactcccgtctccccactgcaatgcaatgcacatgccctgcccttctgcatccactcctgtctccccactgcaatgccgtgcacacgcccctgcccttctgcatccactcctggcacccccactgcaatgccatgcacacgctctgcccttttgcatccactcccggtgccccactgcaaagcgatgcacatgccctgcccttctgcatccactcctggcacccccactgcaatgctgtgcacacgccctgcccgtctgcatccaccacaggctccccactgcaatgcgatgcacacaccctgcccttctgcatccactcctggcacccccactgcaatgccgtgcacatgcccctgcccttttgcatccactcccgtctccccactgcaatgccgtgcacacaccctgcccttctgcatccactcccggtgccccactgcaatgctgtgcataaactctgctcttctgcatctgcagctcccttgccagaaatgcctggctgttttctattcctctgcagataccttttcacattcttagagctggctgaaatgtcaccagcaccagaaggtgagctccatggttttgtcttcttcagcatagaacccactgtgcctcaaacaacacctggcacagagtaggtgcccaatacatatttgaggaaggccaacaggaaggagcaaacagactctccaggaagagcaagtcgctcagtggtcaggttcctgggtcttggggacagtgcatgctcattgatttggggtcctctctgtgcatgtctgcctctctctggagctgtgaactccaccagcttctgttagtatagatggctcagtggacaagaagagtgtgaccctgtctttgagctgatatatgaaaatgagtggcttcacaagtatccaggacctagttgatatgatttaatgcaagtcagaagaacacgtttctactaaccaccactgatagtggccaattcatgtggtcacattagaaagatccatccttctgccactcaaatatttcttttgtcattgttggcatggcagatctttttcgatctttgtactttttttttttttttgagagacagtctcactctatttattgcccatgctggagtgctgtggtgcgatctcggctcactgcaacctccacttctcgggttcaagcgagtctcctgtctcagcctcccaagcagctggaattacaggcatgtgccaccatgcccggctaagttttgtatttttagtagagacggggtttcaccatgttggtcaggctggtctcaaactcctgacctcgagtaatcggcccgcctcagtctcccaaagtgctgggattacaggcgtgagccaccgcgcccgggccatctttgtgctttctacttttcttcttcttatgcttaaggtgtgtctcaacatctagttggattttggttatttatgcagtatgacaatttttgtagtttgatggcagtatttagtctatttacatttcatctaattacttatatatttgaatttaaatctacagtgtttctacttctttttctatttgtctcacttattttatgttccttttgttctatttgcctttttttgcaaataaggtgaagaaaaaggaggtgaagaaaaacattttttggccaggcacagtggctcatgcctgtaatcccagcactttgggagcccaaggtgggtggatcacccgaggtcaggagtttgagaccagcctgaccaacatggtgaaaccttgtctctactaaatacaaaaaaaaaaaaaaattagccaagagtggcgttgcatgcctgtaatcccagctacttgggaggctcaggcaggagaattgcttgatcctgggaggtggagattgcagtgagctgagattgtgccattacactccagcctgggtgacaagagtgaaaactccatcataaaaaaaaggaaggaaggaaggaaagaaagaaagagaaagaaagaaaaattttttaaatgtcatttcccccttttttagcttgttagtgattatatatatatatatatagtgattatatatatagtgattatatatatataatatatatatatttatatatattatatatatataatatatatatatttatatatattatatatatataatatatatatatatatatttttttttttttaccattcctttactagttatgctatagttatgctatggactggactgcattcccccaaaattcatatgtgaaggcctaatccccagtgtgactgtatttggagataaggcctttatggatgtcattaaagttaaatgaggtcacaaggatagggccctggtccaataggattaacgtccttataagaaggggctccagagagcacgctctgtcccgaccttcatctcccctctctctgccacatgaggacacagcaaggaggtggacatctgcaagtcagaacaagagccctccccagaatctgatcttgctgggattcacatcttggacttcccagcctctagaattgtgaaaagtaaatttctgttgtttaagccacccagtctgtggtattttgttaatgcatcccaagaaaactaagatcatgagatgcatccttaacttattaaaatctaaaattaatgagtaatttttaccatttagtcaacaatgcaaggaccttaacatggcttataaccctctatttactccctctcacttttttttctattgtaatgcattttaattcttatgtacaggctaggcacggtggcttacacctgtaatcccagcactttgggaggccaaggtgggtggatcacttgatgtcaggagttggaaaccagcctggccaacatggtaaaaccctgtctctactaaaaatacaaaaattacccagatgtgatgggtgtgcctatagtcccagctactccagccggatttggtgggcacacctgtagtcccactgcactccagcctgagtgacagaccaagacttcacctcaaaaaaaaaaaaaggaagaaaaattgtatatttggttaaaaataaaaccggaaaaaacattatttttgtcaatcttcattaagatttatccatttatttaccctctctgctgcatattacattccattccttcctgcctttctaaagttccatctgtcattttctttctgcctgaaatatttcctttagtatttcttttagtgcacagttactaatgacaagtgctctcatttttgtccatttaaaaatatcctcatttgacttgcattcttaataagtatttttactggttatagaattctagattggcttttcaacactaaaatgtcattccactggcttctggcttccatggttcctgttgaaaagttagctgtcagtcttattgtagttccagtaagggtaatctgtcattttagttggatgcatttaagattatctctctcttattattttgttttcaatagttttactgtaatgtgcctatgagtgattttctctgtattcataatactacaatactgcagggcttcttggatctgtgattcatgtctttcatcaattttggggaattcctggccattatctattcaaatattgcttctgttttattatctctctccttttcctcttcttctgggacttcaattatacttatgatagtattatgttcaatatgtgatataccatttctgtattttccatctatttgtctctgttttcagtccaaatagtttcttctgatgtatctttcaaatcactaattatctcttcatctgtgtctaagatgctttaaattcatctaatgtgtccttaatttcagttatattttttggttatagaacatccattgattcttttttatatatttccattctcaattgaaattctccactttgtcttttgtctccttgaattatcaatcagaggttattctaaagtttgtgtctgatacctccaataactaggtttcctgtaggtcagttgctattttctttctttctttctctttctttctttctttctctctctttccttctttctttctttcttccttcctttctttcttcctttctttcccttttctttctttctttttctttcttttttttttttcaaggtctcactttgttgcctaggctggagtgcagtggtgcaatgacagttcactgcagcctccatctcccaggcccaagtgatcctcccacctcagcttcccaagtagcacacccagactacagatgtgcaccaccacacactgatttttttttaactttctgtagaggtgggggtctcactatgttgcccaggctggtctcgaactcctggcctctagtgatcctcctacctcacctctcaaagtattgggattataggtgtaagccaccatgccaagcctgttttctatttattctcttggttttgagtcatttggtcttgtcttctgatatgcctcatatattttgaacaaatgctgcatgttttgtatgaaaaattgtagaaccaatgtgatgctgtagatgatggtatctttctccagagagtttattttgcttttgtcaagcagttagtatagaggcagagcatcttaatctgatttgaataaaagctgaatcttttttgagagttgatcagaggctgtaaccaaaagcctagggtattaccagagcctttctgagactgccaaagctttgcccagcttcttagcctttaaatcactgctcctagaagcaaatgcctggaggggaagaacagtgccaaatgttaggctcatctttctaggtttccctttctctaggatcttcccctctcaagtcctcactgtctggatagctctctgattttatttatttatttttttcatggccaggtctcattctgtcgcccaggctagggtgtagtggcactatcttggctcactgcaacctctgcctcctggattcaagcgattctcctgcttaagcctcccaagtagctggaactacaggtacatgtcaccaggtctagctaatttttgtatttttagtagagatggggtttcagcatgttgcccaggctggtctcaaactcctggactcaaatgatccaccccacttggcctcccaaagtgttgggattacaagcatgagccaccatgcctggccagtctctgatattttaaaacagatttttaaaattatctaactgttccagttgtttaaggtgggaagtttcatttgatccagactggcgttccagagccagaagaagagatctcaactgttcctttagcataattcctcacctataatgatggttagcataaaaattaaggtttagggtattggctttgaattcataaattccatctgggtgggtttaaaaagtataagttggttaaactggttggaaagagtggaaaattatagttctctgttaagataaattgttctaactaaattagtataagaagcgtttgagcagtcactggaaacatacaatacatcccagttaactttccggtactttttctcttagtgaagtatacgtttgttttatagcagcaagaattagggatgcttctagccttctcagccttctgtcaggctctgggtcatcttgtagtatgcttgttaggtccctaagaagacactgtgtttgcctctctgtttatgcctcaggtaaacccattcaataaacatatagcaatcacatttaaagattctcatcttacttatccaaaagtttcagaaattgtccttttaaagtacaaacatccataaaaaccgagaagatgggccgggtgtggtggttcacgcctataatcccagcactttgggaggccgagacgagcagatcacctgaggtcaggactttgagaccagcctggccaacatggcaaaaccctgtctctactaaaaatacaaaaaaattagccagccatggtggcgcatgcctctaatcccagctacttgggaagctgaggcaacagaatcacttgaaccgggaagtgaaggttgcagtgagccaagatcgtgccactgcgctccaacctgggtgacagagggggactctgtctcaaaaaaaaaaaaaaaaaaaaatccctgagaagaagaaaagaataaacagaacacacacacaaataattttgcacagcagagtggagaggtgatacagccagccacttgtcaaataactacagctgttgcaagcttgatcttggcaggttgttcatgccacatggggaaaagggccttcaaagcacaaagttcgacccattctggcagagtatcaggatgaactagttaacctgaaggccaggctgcatgctggacaagaacagctgggaaggctgagggcatctactgcaggcactcacgttttgaagcacaagtaggttttattaccaaggctgtgcatagccaccagcgaaagtataggtaaggctgcttagtgaactgctttgggaactgaatgagcagaaacgaatctgtgagccctagagactatcctctaaaaaggccatggactgattgtatgataatgtttgggcctctgaacacaagtgggagattcaagaccagccactcaaatcagattgcttcagttaataaaataagggacaatgacaggaagtacatggtgtgggggctggtcctctcaactccttggagagacacacagaagaaaaaaaatggttttagctaggctataatcacagaatctgttaggactaaacggatcctccttgtagatagagtctaacgttaaccaccttatgttacagatgaacagacaccatgccgaaaactccttttcacctgccagtcctcatatcaaacactcattcttcggcaaaggcttccctgcttccatttggtggctctatccttcattcatttattttctttatttttcttctttttttgttttagagggagtcttactctgtcgcccaggctggagtgcaatggcacgatctcggctcactgcaacctccacctccccagttcaagtgattctcctgcctcagcctccctagtagctgggattacaggcatctgctaccatgcccagctaatttttgtgttttttagtagagatggggtttcatcatgttggccaggctggtcttgaactcctgacctcaggtgatccaccctcttcaacctcccaaagtgctgggattacaagcgtgagccatagcgcctggccttcttcattattttctaatctcaagtgtgagctccatcatttcaggagctcaagaaaacaaaaggtcctcaatatcatttgctgaagggacacatgagaaggggtatctgcaaagtgcactgagtctccattgtcctgagccccagcccaggcaattcagccagactccaatagcagttcaaaagtttcagaacactctgaaaaaacaatttaaacatgatatgaaatatagagaataacagaatgacccaccatgtacacattactaatgccccatcattttcccatctatatcttcacacacttcccttgccccatctaaaactacttacacacaaatcccagatatcctatcattccctctaaatattttatcctgtattttcagaagataattttaaaaataccaccataatattaccgtttctaaaaaatttaagaagacttttaaaatatcaaatatcccatcagtattgaaattcacaagtgtcctaaaaacgttagtttttttttctttttatcatttgtttgattcagaatctaaatgtgattattttccttgcaattcattattgaagaactgggtcgtttatcctgcggttttacaagagctggattgttttgattatgtccccatagtgctgtttaacatgttcccctgcagttttcatttcatgtaaattagtacaggagtccccccccatcctccaggatatattccaagacccccagtggctgcctgaaatcatggacaatagcaaaccctacatactgtagagtatgtttcttcatatatatatatatatatatgaatgataaagtttaatttataaactaggcacagtaaaagattaacaacagtaactaggcacagcaagagattaacagcaataactaataataaaatagaacaattacaacaatgcactgtaataagagttacgtgaatgtggatgtagtaacccagacgggtattgagtgactaatgggcaggtggtatggacagtgtagatacacaaggggatgatcgcatcagggtggtggagtggcttcgttgtctggggtaaatacttgaggttcattgcctcataccaaggaaatcaaggatccagatgtatgtgaaatgaggttaacagcggaggtttaataggcaaaagaaagagaaaagagaatagcactctctcccacaagagacggggcgggggggaaggggcggggcggggaggggcggggcggggcggggggccggccggcagccctggaggagtgcactggatttcatagataagcttgaggaggcggtgtccgatttacatcgggcccaaagattggttggactaggtgtgatgtttacataactcgcagggaagccggctaccccaccctaatctttttttttattttagacagagtcttgctgtgttgcccaggctggagcgcagtggcgcagtcttggctcactgcaacctcccaggttcaagcaattctccggcctcagcctcccaggtagctgggattacaggcgaccaccactaggcctggctaatttttgtatttttaatagagacggggtttcaccacgttggccaagcttgtcttgaactcctgaatgcaggcgacacctcctcccccggccctcagcttcccaaagtgctgggattataggcttgagccacctcgcccagcccaccccaccctaatcttattatgtaaatggggtctttgcttggccggggttatgttgcctgctccttggtgtacacatgtctggcaaagagaagggaagattgagccgcctttttgaacatgcctagtcccaggtagccttttcctattggcacagctgctggcattcacccgtgcaagcttctagcttgcttgtctatgtctgcagctcgattttacaggctgctctttgttagaaaagaaaatgatttgggggctgctttccattaaaaggaaaaccttaccaaggacttccttaccctcactatctgcctaaatcatttcttcttaactcccctatcagtgggacagagcgggccagcaggagatttcattgtgctattcagaatggcacgaaatttaaaacttacaaattttttttctgtaattttccatttactatttttagactgcggttgacttgggtaactgaaatcaaagcaagacggtgggtaggggggaccactgtggttgatctcagtggtctagacaccttttgggacccctcagagctccatatatcaaacctgaatctgatcattcatgggggttcagtggggccccaagagatgtctagaccacctcatagttgatgctgagtttttttatttcaaggcatataatgtggggaaatggagtgatctctttttctgatgtcagcagccactgctaatcgtgcctacatccattcattcatcagggatgcaaaatagtgatattctgtctattgattcttcctcacttaatagctggaaatactttaggagaaatacccatctcagataccgtgtggccaccaaagcccaattttaacacaattgtaaccaagacaatgctttctctccttacagtcctctgcaggaggttgagcgactttaagcaaacctttttttttttttttttgagatagagttttgctgctgtagcccaggctggagtgcaatggtgtgatgtcggctcactacaacatctgcctccagcgttcaagcgattctcctgcctcagcctcctatgtagctgggattacaggcacgtgccactaagcccagctaattttttgtatttttagtagagacagggtttcaccatgttggccatgctggtcttgaacacctgacctcaggtcatccgcccacctcggcctcccagagtgctggggttacaggcatgagtcactatttattttctagccaagaactgactggcagaggtgggcccgacagctgtgggaaacacattcttgcctggttctctcccggccagtcagctgaagcagaggccctgcctacccagagattttctcaaagcagcacggctccagggcctgctctaaaggtctggcctttctctttgaaaatgttttctcctgtaattaagggattttctaacttgagcaatagattaaaattcatcaaaattatattttcagaaagccataaacctgaagctactaaggtctggctccaggaaatcctgaatccaggaaggatgctcagcgggacagaattgaagacaatagttcatcatctttccttcccaggatcgagaatatcccaaggaaatgccaagtaaaaaagtaaaatcagcgattgattttgcgtttggagaactgaccacgtttcttgatcaaatgccgattgcaagtctgagtcaaggttgagcatataaaggaatcctcccgggtacctccccttggggtcttcacatgatgtgattttgaaaaaccagactcgggcgatcagagacctcactgcggaggaaatgaaggatgcctcgcttccaatacctggctcccatgaacactccctcgggtccctgctagcgccagcctgagacagagagcgcttcctgtcctgctgactgcagaagttaaacggaatctccactcccggattgaggaaagaaaggcgtcttcctgttgattttcgcgaggctgctgaccttcgcggcgccccgactgggcccaccccgcggagctgtcggggcagcaggcgcccaggacttcctgaatccccggcccctctggcctaacctagatctcccaggactcaggcctgggaaaatcacggcgtctgccaggccctcctcgcaggctttgcagtttgctaactcgcggtgcggccttgggacagtgcctcagtttccccaagtgtagtgaagtagggctggaccgtgattctcagaatcacccaagaagcttttccagcatcgcctgccagggtgtccctggggacccaccggatcggagagggggtcgggggcgaaaagcgccaggaggctggcagcccgggctggaacccgggactcgggctcgcccgcctcggcagctactccacggtctgcctggccccggagctcgccttcggcctgggcggggtcttgcgcgtctccgggccggttccgggaggccgggcggggcggggcgggccgggctgggttgtcccaccggaaagactcgtttcagctggagcaggcggcggccgggcggaaacagacttgtcgcccccgcctcgggcactccccgctcccccaccccaccaccctccccccccgccctgcgcggcccgccagggtccgggaatcgctggcctgcagctggggcagccccgggtcacccccgcccacgccttccccgcccacaggacgcgccccctaggccacacctgagctcgccctgcggtcccgggcagtgactccgccgagcctcggtgggggaggggacaggggagagaatagggaagaggggcgcgatctgtgtctgggacccgttgccaagaaacccgaccctcgggctctggccatcagcagccgcggtgcagctgcctccccctgcctccaggtcgcccagcagagctttctagagctgggtgctcagaagaccccaggcggaggcaagaaccttgggccgcggctctgtgggaaaagccctcggggaagccagacggcgcgctccagctccccatcgcgggcgtgggccccggggtggaggcagttgggtcgcggccctgccacccccatgctgcacggcctcggcccagtgccaccacctctgtgggccgccgtttcagcctccagatggggtggcggcgggccccagcccttgccccaagtctctaaggaagggtctggcctggcccgcccagatccgagctgctgcgtacgcgcggggctgggagctgcaaaaacgcccggggcccagggtgagcggctgggccctcgggggacccggcgcgcgcgggggctccagctccgccctgttgggggccagagcaggagggaggccgccccagcttgttctgggccgcagccctgccgaccgcacgggacaggcgccgcgtcctctctgggcctccaagacgcagactagaagcccatagctgctgggaagatgggcaccccaggtctccgcgcacggccttcccagggccacggtgaaacatggatgcgacactcaggcaccttcccggcccccggcgaaaacgcaaagcctgagcccatgatgggctcggaagctctgcgggattgagtcatcagaggaatgctgatctagaagtacaatggctggaagacacccgcagaaaccgcgggcactggagagcaagtgcagctttaatctccaggcgtgatttagatggaaagcagcctgaagaccagttaagagaaccgcgagcagagcgcgctggactagcaccaacagacgtgagttcgagaccgtcctgccccttaatcctgtgtgaccttggtccattttttaagtctgtgagcctcgcagtgttctcattcctgaaaagagcctgccccatctccggactgcagtgagaacaaaaggagactatgaacatgactttttgccacttttgaagccccacactgaggaaagattttcctagcacttgggagattttctttagcaccagctgccaagaatgctgggaaggagacagccccatcccagaaggaagacaccttaaatcagaactttatttttcctcctatgaaaatacaatctaatactggagaagtgtaaaaattaaggagtcattagaagccatttgttgttgttgttgttgttattgttttgagacaggatcttactctgtcacccaggctggagtgaggtggcacgatcattgctcactgtagcctccaactcctggactcaaacaatcctcccttctcggcctcccaagtacctgggacgagaggtgcactgggcgtggtagcacacatctgtagtcccaggtactttagaagccgagaagggaggtctcactattttgcccaggctggtctccaactcctgggatcaagccatcctcttgcctcggcttcccaaagtgttgggattataggtgtgagccaccactcccagcctgttgttttaactttctatcaaagaaatggatggagggtggacagggatgctgggtgctttagattagacttgaaagagttaacagcataggttacagaatcacacatacccgaattggaatctcatcttgaccctttactaccactgtttcgttatgttagtgacttaacctctctgtgcttcagtttcttcatctgtaaaatgaagaaaatggcaccaacctgtggggttgttgagaagatgaaatgcaatagtgaatgtaaaagtgcctgacaggacccagcacgtggtaatacataataaatgctagctagttttggtttccatccttccttcctaccaatttttattgtaaaatatttttaaacatgcggaagagttgaaagaatcatacagtgaacacccacgcatgttccacctagcttctgcattaacatttttactctatttgctctatcacatatctgtccatctagctttctttccctctatccatatatcaatccatctgttctggttactactgttatgtaacaaattcctcaaaacttcgtgacttgaaaaaaacagccatttttgtcatgctcatggatttcatgagttagaaattcagacagattggcttgttgctgctctaggacgtctggggtctcagctcggaggacttgatgcctgcaggctggaatcgtcctgaggcatcttcacgcacatgtctgggggttgccagcatcgtgcctgcgtgtgatctcatcatgaagctcagacttcctcccagcatggtagcctcaaggtagctgaacttctcccagggcggctcagagctccgagagtgtgttctggcaaacaaggcagaagttgcagtgcctttataacccagccttgcaagttacatagcattgcttcctgttggtcaaagcagccatagattcaaataggggagaattaggttccacctcttgctggtgatgtgggaggctcattttgtagatctgtggcacaggaactgttgtggccatctttggagatgccacatttacccctttggtcacaataatgcttgtgcaatatgcacaaattctcattccatgaaatcatcaggctcagagtccaagattcctttttattgttgttgttggcttttgttttttagagatagggtcttgctctgttgtccagattggagtgcagtggtgccatcatagctcatttgagcctgcaacttctgctccagtgatcctcccacctcagcctcctgaatagctgggactgcacacatgcaccaccacacccatctaatttggtttttattttgcagagacaggggtctcgctatgttgcccgggctggttttgaacatctggcctcaagcaaccttcccaccttgacctcccaaagtgctgggactacagatgtgagccaataaaccacttcaaaataaacctttcttgtccgggcgaggtagctcacacttgtaatcccagcacaccaggaggccgaggtgggtggattacctgaggttgagcaacaaggagaaaccacgtctgcactaaaaatacaaaaattagctgggtgtggtggtgtgcgcctgtaatcgcagctacttgggaggctgaagcaggagaatcacttgaacctaggaggcagagtttgcaatgagctgagatcacgccactgcactccagcctgggcaacagagcgagactctgtctcaaaaaaaacccaaaaactaaaataagcctttctctcttttgggttccccatgaaattgctgtgggacaatgcccttaagattcctagaagttggttgggcgcagtggctcacgcttgtaatcccagcactttgggaggctgaggtgggtggatcacctgaggtcaggagtttgagaccaacccggccaacatggtgaaaccctgtctctactgaaaatacaaagaattagctgggcatcggggcagatgcctgtaatcccagttactcaggaggctgaggcaggagaattgcttgaacctgggaggcagaggttgcagtgaactgagatcccaggctatgcactccagcctgggagacagagcaaaacttagtctcaaaaaaaaaaaaaaaaaaaaagattcttagaagtcctattgtttaacacagaggatctacaaagtatgctgttagtttccttaagaggctttttgtctggttgaaagggtctacaaggcaccaccataaaattttctcatatcttaaagaagaactttacagtggggcacttggttcacccttaccctgagctgctttcctaacagtgccctgggtctgatctttgccctttttgaatcttccactgggagaaacgtggaatgagaaacagttttttgttttgttttgttttttgagacagggtcccactatgtcacccaggctggagtgcagtggtgcaatcgtagttcgttgcagcctcaaccttctgtgcttaagcgatcctcctgcctcagcctcccaagtagctgggactacaagtgcacgtcaccatgcctaactttttaaaaaatgtattgtaaagaacattttttaaatttttatttttattttttattttttgtagctatgttgctcaaactggtctcaaatgcctgggctcaagcaatccacccgccttggcctcccaaaacgctgggatgacatatgtgagatactgtgcccagctgagaaatagtttttgaatccacctggtcccgacttctaaattctgcctgaagctgaatatttctttctcttcctctacgatacagagctaagagaaaacaaatggtagctcaggactctgcttggaaatctagaaatagctggaggctgggctaggacaacttgaaaattaagacaagcaaatggaggaatttcatgtggcttatcaatgaagttggcatcatgacttcatggtgcctcaagatagtcagacttcttaccggatggttcagggctccaatcacaagtgttccagtgagtaaaacggaagtgtcaggaacttttctggcgcatgcttataaggtacacagtatcacttccatgtaactctgctggcagttgagtgactgttccactcaacactgatggcagtcacacgcccatctagattcaaggagaggggaattagactctatgtctagaaaggggagtgtcacgattacatttagcagaacacgtgggaacggagatgttgttgtagtcatttttggaaaatacaatctgccccactgtccatgttttgatgcatttcagagtactttatagacatcattacacttccccaaaattcaccaaaaatgtgtgagagtttcgactgccctcgttctcacccgcaaatggagctgagggccatttacattttaatcattctggttggtgggtagcagtatctcattgtggttttaatttgcatttcccagataactaaagatattgaatagtttttcatgttcttatacaccactcatatcttccttggtgaagtatcttttcaaatctttggcccattttttggactttatttattgatctttttttttttttagagagacactctttggctcaagtgatcctcccacctcagcctcctgagtaggtgggaccacgggcacatgccaccatgcccagctaaatttttttttatcttttgtagagataggggcatctgtatgttgcctaggctggtcttgaactcctggtctcaagcgatccttccactcggcctcccaaagtgctgggattacaaatgtaagccaaaatgcccagcttgagatttttttttttttttccaaatggaaatccagttggtccagtacaatttgttcatgagtttcctttccctgttggattgcattatgtttgtcaaaaatcagatggctggccaggcgcagtggctcatgcctgtaaatcccagtactttgagaggccgaggtgggaggatcccttgagcccaggagttcaagaccagcgtgggcaacatagtaagaccccatctttttttttttaataaaaaaaatcaaatggctgtattcataaatatgtgtttctgggttctctatgctgttcgttgatctatttattcctcctattgctggtcccacactgtcttgattactgtaatcttacagtaaatcttgaagttctcgttcctttttgagtaagatgattcctttttaatggacaaaatattgctgacttctacatagctgttgcatttctagcatgttgatttagcaaataaaagtagtaaaaagaacttgtgaacacctgaaaatgaccttggatcttagtgatcacaatgacaactacagatatctagaaatctgtcacctatgcacaggtggacatcacatggggatgtgtgatggccctgaggtgaccacgtattcctcagcaggaaaacggggtgtttttctgctgctggaatcactgatagccatcaatttaggtgagattcccaaagcagtggatttcttttcaacaggaagataatcagttgagttttccaatttgtccatgtgaggtttcttccagactgagcaagatacacagggatgagagaaggtactctatgggatttagtctttcccaggagacactggattggatgtcccaagaggaccgttatgagttgtgtgtcccgcaaattcatgttttagtcctcacccctactgtctcagaatataacctcatttggaaataaggtgtgtctgagtctgttcttgcactgctataaagaaatacccgagactaggtaatttataaagaaaagaggtttaattggctcacagttctgaaggctgaacaggaagcatggctgggaaggccttgggaaacttacaatcatggcagaaggcaaaggagaagcaggcacatcttccacggcaggagcaggaggaagagagaatgaggcgggaggtgctacgcacttttacataaacagatgtcttgagaactcactgtacagtaccaagggggagggtgctaaactattggtgagaactccacgcccatgatccaatcacttcccacctggccccacctccaacactggggactacaatttaacgtgagatttggagggaaacagatccaaaccatatcaaggtggttgcagatgtaaaatgaggtcatgtgcactgtgaccttatgaaaagaggacacagagacagacatgcatagagggaagattctatgaagatatttggagaacaccctcttcaagccaaggagggcctcagactgcaagaaacaggacagaggcatagaaaagaactttcctcagccctcagaaggaaccgcctattgtgctgacaccttgacttctgatttctggtctccagaatggaaacaatacatttctgttttttgttttgaaacagggttttgctctgtcgcccaggctggggtgcagtggcatgatctcggctcactgcacctccacctcccaggctcaaatgatcctcccacctcagcctcccaagtagctgggactacaggcgcaggccaccaagcacggctaattttttatttttatttttgaagagacagggtttcgccatgttgcccagcctggtctcgaactcctgggttcaagcgatcctcctgcctcagtctcccaaagtgctggggttacatgtgtgagacaccacacgtggccacatttctgtgttttaagcaactcattctgtgttatgacagccctcagaaacaaatacaagtccccagccgtctgctgtccgccacgcatgcctggccttcgatgggcaacgaggtcccacttttccctctgggacccacctctttcctattgcatgtggctcgtgggaagtcaaccccagtgcccactgcctggcaaagggttcagctcaatgcccagctcctgctaggagtctcgagttttgagtggagggacctggggtgtacaatgctttgtgctgagccattctaatggcagtacccccaaatcctgcttgcacccccacatcctcagatcaccttggttcctaatctacccaaggctgactgtctagcttttgtgttgtcccatgtcctttcaataacaataatgattattctgatttgctaatgttagccagcgctggcttctgttacctgcaacaaaaatccccagttgaccccgtcatgcccttggcctcggctcggttcttcttctctcctgtctaaaagccattaggtggagccaaggaaaacaggcactgttgcagggtggaggtgggcagtgccagtgccggcagcctggcacggaacaccggagcccagcagggtaaaggaaattggtgaaatctggtgtgggattctggagcccagtgagatgaggaggatgcactgggaggtggcaggggcggggctgggtagctgccccagcccagcacagggcattgcaacaaaagcaggaagagcggggagtccagtgtgaaaaagtagtctcagttggatgaggcggtgactgcacggagtggagtaggggtgggaggtggtgctgtgcgggttgtttgatcccaaaggggatatgacccgagagaccaaagttgatgcccctttatcaactaagacggaccctaaggttaaggaaacaaaagttacctatgggtcgagggttcagggcctggctgacacggcaaatttctaaattcctaccattacaagaaaaaccacactcttgctacgctccttaacgataggagctatcgggcaaattatcagctgatttacagatcagatcactacaactctgattggacagaggaccagccttacaaacattctcttctgataagcaacttcaccttaggccagtctcagcagctgatagaggctgtgcacaaactgtctcggcatcttatagttcactttttgatgtaaggggctaaattccatctcgttttaatcctaaaaccccatttcaaagtgaacatgggatatatgttacatacacataccacatactacatcatatacatacatacatacttttcttcttttttttttttttttttttttgagaccaagtctcactctgtcgcccaggctggagtgcagtggtgcgatgtcagctcactgcaacctccgcgtcccagattcaagcaattctccctgcatcagcctcctgagtagctgggattacaggcgcccaccaccatgcccggataatttttgtattctttagtagagatagggttttgccatgttggccaggctggtcttgaactcctgacctcaggtgatccgcccacctcagcctcccaaagtactgggattacaggcgtgagctaccacgcccagcccataaatacttttctaagtgaaagtttacagtgtgttagaagaacatttttctttcctcattgggccctcatagttccatagaaacatccaacaataaaaggcaaattgaatcatgttttctttcaaatgcatcataaactattttccttcagtgaatggaagagtttggcagaggaattttaaagaaaacattgagaagaagttattagaacatgtttctttgtccaataggtgctgaaaggcccgtagagaaatccactcataaccgagtacagtggctcacacatgtaatcccagcactttgggaggctgaggtgggtggattgcttgagcctaggaattcaagaccagcctgggcaacatagtaagatcctatctctaccaaacaaacaaataaaacaaagtattagccgggtgtggtggcatgtgcatgtagtcccagctactcaggaggctgaggtgggaggaacatttgagcccaggaggccgaggctccatgtgagacatgttcgtgccactgcactctagccggggtgacagagtgaaaaaaaaaaaatgagagaaatccatctattgcacatgaactcagctcccctcagaaatatatatcgttttttcctccagcttgctgaatacataggactctattgtgtgatacagaccctgtgaggcataaaacccaacctgccccttccctcattaaagagaggacaccttctgcacatgccagagatggtctcttcccggtttgcaaactgataccatcaataaagctctcctttctacatttatttatttatttatttatttatttgagacagagtcttgctctgtcacccaggctggagcacattggtgtgatcttagctcactgcaacctccgcctcccaggttcaagtggttctcctgcctcagcctcctgcatagctgggattacaggcacgtgccaccacacccggctaatttttgtatttttagtggagacggggtttcaccatgttggccaggctggtcttgaactcctgacctcaggtgatctactgtcatcggcctcccaaagtgctgggattacaggcatgagccacagcgcccatccttctttctactctttagcaatcctggtggtcatttggacgacatggatgaggagggtatctgtgtgggaacaggggcagcaattggttgcatacagaggacttcaatctaatacataaatatatgggtgtaatgagagctgggtttctcacagttaaaaaggggagtttcaaatatagaaagggaggaaaaccctaaaatgaaaccattatgggctgaattctatcctcccaaaattcatgttgatgtcttgaccccaagtatctcagaatgtgagggtatttggagatagagcattgaaaggggtgattagattgaaatgaaataattaggcaggccttaattcaatttgactgatatgcttataagaagagaaggtgaggacaaacagagagaccccagaggcatgcatatacacagggacaaccacgtgaagaggtagcaagagagtggccatatgccagccaaggagagaggcttcaggataaaccaaccctgctggtaccttgatcttggacttccagcctctggaactgtgagaagagaaatgtctgttgtttaagccatgcagtctgtggcattttgttatggcagccctagcaaattaacacagaatcttttaggattagatgaaaattggagttatcagtgtagattcatggttttcaatgtacatataaatagatgtaaaaataaatgtagatagaaatgtgaatgtacatatataaatgtatgcattatgcatatttgcataaatattatacacaaacatacactcatgtatttcctacttctgttcactgagagcccctggaagcagtgactccccaaaagccatgagctcatctagtgtccaaatcttgttttctttcattctttccttttttaagagacagagtcttcctttgtcacccagactggagtgtgttggcaccatcttagctcactgcagccttgacctccaggggctcaagtgatcctcccatctcagcctaccaaagcactgggatgataggtggtatagtttggttgtgcccccacccaaatctcattttgaattttagctcccataatccccaagtgtcatgggagggacgaggcagagataattgaatcatgggggcagtttcccccatcctgtttctgtaatagtgaattagttctcacgtgttctgatgtttttataaggggcttcccccttggctgggcactcattctgtctcctgccgccctgtagggaggtgccttccgccatgattgtaagtttcttgaggtctccccagccatgcagaactgtgagtcagttaaacctctttcctttataaattacccagtcttggatatgtctttattagcagcatgagaacgaactaatacaatagacatgagccaccatacccagaccagatcttgttttctaaatatcagtctccactaaaagagccgagcagggatagtaaagatgagctttaaacatcttcttgtagaagattaagaaagtgcttataggatgatggaggcatgtcaaaaggacacagagcagctcccactgaccacatctggggcaattataaaccactaagaaaaatacaaatccatgagtccatactcctataaataaataattgtggggagaaacagcagaatgcttccctgcagtagaatgccaagtgtataaggaatcatggggtgagaaaatcatcatctcgttacctccacagcaataactaattaatccaagaatcatcaatgtaggcttaaactagtgggtagaggcttgatgaggaacaagatatttagtctcaaaggcacctcctcacaaaatgtttattaattacaaagctaaaaagagtgatttggtagtaaagaggcttggcaggtacagatatgtcttcatcaagttaacatcatcagtaacaggagaaattggaaatgtgtgccatctggtaagaagagcagagcctcacctctcggatattcctgcccaaaatacataacctgaatctaaacacgaggagacatcagtcaaaccaaacgagggacaaacaaactggccggtaatcttcaaaataactacaaaataactacaaaaactggctggtaatctacaaaataactggctggtaatcttcaaaagtaccaaggtcaaggagagactgaaaacagttcagactgaaaactaagagatgtgacaattcaatgcatcacgttttcctagactcaatccttctgctcttgaaacaactaattacattggaatgaggtctaaggagatgctagttatgtatcaatgttaattttctaattttagtcacgtattgtggttatttagtataatctccttgtttgtaagaaatacacattcaaatattagaaagtgggccgggcgcagtggctcacctgtaatcccagccctttgggaggcctaggtgggtggatcacctgaggtcaggagttcgagaccagcctggccaacatggtgaaaccccatctctactaaaaatacaaaaattagttgggcgtggtggtgggcgcctgtaatcccagctactcaggaggctgaggcaggagaatcacttgaacctggcaggtggaggttgtagtgagctgagatagtgccactgcacttcagcctgggtgacagagtgagattcggtctcaaaaaaaaaaaaaaccagaaaaaagccaacaacttattctcatacttttcaagaataagggggtctttgtactatatgtacttgcaacttttatgtaggtttaaaattatttaaaaataaaaattatctttaaaattatctaaaaactatccttagaagatacacagatggcaaataagcatatgaaaggatgttcaatgtcatttgtcattagggaaatgcaaatcaaagcaataatgcgatactactgcacacatattagaatggctaaaatccaaaaaactgacaataccaatggctggtgagagggtgcagagcaatgggaactcatacattgctggtgggattccaaaatgatacagctattttggaagacagattggcagtttcttacaaagctaagcacagttttaccatatgatctagcaatcatgctctgatatggcttggatgtttatcccctccaagtctcatgttcaaatataatcctcaatgttagaggtggggcctgatgggaggtgtttgggtcatggggacagatccatcatgaatggcttggtgccatgcttgcagtaatgagtgagttctcactctgagttcatgtgagatctggttgtttaaaagaatgtggcatctcctccctctctgtcttgctactgctcttaccatgtgacacaccagctccccctttgcttccaccatgattgtaagcttcccgaggccctcaccaggagcagataccagcaccatgcttctcctagagcctgcagaaccacgagccaattaaacctctttctttatacattacccagcctcaggtatttctttacagcaacacaagaatggactaacacaggctgctcagcatttacccaactgatttcaaaacatacgtctgcacaaacgtctgcatgtgaatatttagggtagatgtattcatgatcacccaaaatcataaacaactaagatgttcttcaataagcgaaaggataaagaaacagtggtccgtccattcagtgggatactacttagtgattaaaaaaaaagtgagccatgcaaaaaatatggatgactgttatatgcatattgctaagtgaaagaaaccaatccaaaaaggctatatgctataggatttcatttgtatgacattttgcaaaaggcaaaactttagagacagtaagcagttgccaggggttctaggaaggaggagacttgaatatgtgaagcacaggtggttttttagggtggtgaaactattctgggtaatactgtaatggtggatacattacattgcattatcaaatctgtagacctttacggcacaaagaggaacccttaattatgcaaattttaaaaaatcatttaggaggttggaggatcccaggaagaatgtagatggtaacaaaataatctacctgtattacaagggtatgaaataactttactgaaaaaggtagggtgaaaatagtgctgacctatgtaactatgaagataagtgaagacttaaggcaaaattttctgttggtctacaagtatcctaaatgaaagcattgatttaagattatctttagcatttgaaaagatttggtattctagtagagaaatcatcatcctttaggcccatcagttcctccggtcaccgtgctacacatttgggacgctagtagagggtcttgctagatggcagttatatcaaagagacatgggaacaaactgaaagaacttccaaaggcaaagatgaaacaatttcataaaccaagtaaatgacatagtgttagattataactcaaagtgtattatagatagccatgagtccatactaatataagtaaattattgaataagtaactaaatgggaaatagacaaatttttcatgcaggattctttttttttttttttttgaggcagggtctcactctgttgcccaggctggaatgcagtagtgcagtctcagctcactgcaatcttgtcctccttggctcaagtgctcctcctgcctgagtcccccaagtaactggaaccacaggcacatactaccatgcctgactaatttttgtattttttatagagatagggatttgccatgttgtccaggctggtctcctggagctcaagtgatccacccacctcggcctctcaaagtgctaggattagccccttgtgcggaggggtgaaatgcacttgggaagctctgctagtcagtgagacactgctgttgctgctgcccctggtcctgaagctgtccttcctccctgatgtacttgactaaggcacaagtataatctgctcctccatccctgaatgtggagatgcagtcatggctaagacgcagcctcactcaagaaatccctccagctttgtgtgatgcctgtaaaaaatgttttctgggtgcttcagaagtagactttaagattgctgccctcatgtattttttcctaatattttggcacgtatttgttgctttgcacaatcatctctgaaaatttcatcttttaaactctacctctagagacgcagcaaggcagcagtgtcattggttttctatgtaagaaaatcatctctgtattaaaaaaaataaaatagaccgggtgtggtggctcatgcctgtaatctcagcactttgggaggccaaggcaggagcattgctggagcccaggagttcaagaccatccagggcaacatagtgagaccctgtctctacaaaataataataattattattatttaaaaaaataaaggctgggcacagtggctcatgcctataatacctagcactttgggagcccgaggtgggtggatcacttgaggtcaggaattcacgaccaacctgaccaacatggtgaaaccccatctctactaaaaatacaaaaaattagccagtcatggtggtgggcacctgtaatcccagctactcagggggctgaggcaggagaactgcttgaacccgggaggcagagatggcagtgagccaagatcacgccgttgcactccagcctgggcaagaagagtgaaactccgtccccaaataaaataaaataaaataaaataaaataaaatggagttagtaaccaaccagtgttttctttgaggaaatccagagtaaggcagacacaacatctgtttctgtctcagacctgagctcctacctggtctcagcatggcttgagtcctatggattgccactggaagaagctccagataaaaatagcaaaagaataaagaaatggctcccgacctctggccttcttcaaaagctgatgagctaatggagaaaagctcggcaaaccaaaaacctccatgtgtgcccagttagagaagtggaaggccacctcttggctttagtaggaagcttgtggtggtttccagttcttacagaggagccacattactctcacagcagtattcttaggagtcaaccatggccaatgtcaccctctttttataggggggctgagattgggagggcagacaacctgcccactgccaggcacaggctatacgctgccactactactatcactatgactgctatttctgctactactacacactacggaaaggtggccttatcttctatttaggtttttagactagtcaaatgtactcccagatggatggattgatagaaagtttatattatttatttatttatttttgtagagatgaggttttgctctgttgcccaggctggagtgcagtagcacaatcatggctcacagcagcctcgacctcctaggcccaagcgatcctcccacctcagcctcccaagtagccgggactactggtgcacactaccacatccagctaatttttaagttttttctagagatggagtcttgctacgttgcccaggctggtcttgaactcctaggctcaagcgatcctctctccttggcctcccaaagtgctgggatcacaagtgtgaaccaccacacctggccaatttttttaaaaaacgggctttattttttagagcagttttgggcttgtagataaattaagtggaaaatacatacagttctcatatactccctcaccctcgcagtttcccctactactaacatactgcaacagtggctacatttgttggaattcatgagccaatattggtacattgtttacttcatttgttagaattcacagctcatattgatacattgatattaacaaaaatccatagtttacattagggttgactctgtgttgtacattctatgggttttcacatgtatccaccattatagtatcatacagaatagtttcactgctctaaccagcccccttcgtttctccctcactctctcttcctgtgaacaactgaaacattgatctttttactgtctccatagttttgcttttcccaaaatgtcatgcagttggaatcatacaatatgtacattttcaagttggcttctgtattagtcccttctcacactgctaataaagacatacctgagactgggtaatttataaaggaaaggggtttaatggactcacaattccacatggctggggaggcctcacaatcatggtgaaaggcaaaggagaggcaaagtcacatcttacatggcgccaggcaagagagcatgttcaggggaactcccatttataaaaccatcagatctcgtgagaactcattcactatcacgagaagaggatggggaaaactgcctccatgactcaattatctccacctggtccctcccatgacatgtggggattatgggaactacaattcaagatgagatttgagtggggacacagccaaaccatatcaacttctttcacttagaaataggcacttaagattcctccatgtcttttcatggctcgatagttcatttctttttattgctatataatattccattgtgtggttatacctcagtttgtttaaccattcaacctattgaaggataccttggttgtatctgagttctcccaattatgaatgaagctactataaacattcatgggcaagtttttgtgtggatgtaagtttccaactcatttggataaattacaaggagcaaattgctgaatcctgtggtgagagtatatttagtttgcattcccaccggaaatgaatgagagttccattgctccccattctcatcagcatttggtgttgttcgtgtcttgtgtttagccatcctaatggatgtgtagtgtagtgcactgctgtttagatgtgcaattctctgatgacatgaggttgagcatctttttgatatcttcttttgctttattttaacaagatgtctgttaaggtcttttatccatttttaaattgggttgttttcttattgttatttttaagaggttttttggggtgtgtgtgtgtgtatgtgtgtgtgtgtttgtattttttaatttttttagacagagtcttactctgttgcccaggctggagtgcagtggtgcgatctcggctcactacaacctccacctcccacgttcaagcaattctcctccctcagccttctgactagctgggattacaggtgtgagacaccatgcccagctaatttttgtatctttagcagagatggggtttcatcattttggccaggctggtcttgaactgctgacctcaagtgatctgccttggcctcccaaagtgctgggattacaggcatgagccaccacacccagcatttcttttttttttttttttttttttggaattctttctttaaaagatcacatttttggtgttgtatctaaaaggtcattgccaaactcaaggcacctgattttctttttcgttatcttctagttttactgtcttgcctcttacatttaggtttttttaattgcaaacctcaagggtggaaccagactatcaacatttggaatacttgaagtgaaaataataaataataatggaaggctggggttgaaaacacaagcatggcaggcgagatccaattctgctgggaagatggcaagcttctcttttacaaggagataccagggatttctcccctaaggatacactgcttcccctcatctttcctgattcctttccagccacacagggatctgatcttatcaaggggagagatagggacggacatattcctgcttgggagctatgggtctccatcatcagagccatttccacccttacaaggaagggcaagtgaatagatctggccccacaagcaagaaggaaaatccattctgctgctcaggtcatagatggggagctgagaagaaaataaacggtgagtgagaatttggaattattacttctttttggttaattttttttctgctgctgtattgtgtctttgcatctgattccaagaaaaggattgaccccaaggtggaggtggggcatccatacagatgacatcactatcactgcatgactgctttgctcagagctgggagctgggaaagggatgctgccaagtctggcaatggaggctggagcttcacaaggggagttttcctggtggatgtcagccttgagaaaagccctcctggggctggggctgggtcttttcttctccaagtcagtcccaaatccttttaggagaaaacacaccctccatttggaatgtactgagaagtagaattgaaaggtctgggtgagggataggaggaaggatgaatggaggagggccagggaggactcccgggcttctggcatctctccaatgaggaggggaatccagggatcactgtttaaatgtgcaaagtctaggccaggcatggtggcttatacctgtaattccaacgttttgtgaggctgaggcaagaggatggcttgaggccaggagttcgagaccagactgggcaacaaagcgagaccccatctgtactaaaataaaacaataacaaaaaattagccaagcctggttgcacacacctgtagtcccagctactcaggaggctgaggtgagaggatcacttgagcccaggaggtggaggctacagtgcgctatgattgcattactgcactctagactgggtaacagagcaagaccctgtcgcaagataaatacttaaataaataaatgtgcttagtctaaagggctgctgggatgtctgaaaagcaatggatgccttgtagagagcccactaaatgggcacaagggttttctgttttctgggggtacccagggttctagctggaaagggacaggcttggagataagtggccctgcaaagactcttctccttttccaaccttagtattaaaatccctttgatggtccagtgggccttaggccaaaggaagaaaagagtttatgaaaaaccattcaaagaactaaaaataacttgctcatttctcggctagactggctttgttcaagtcttagaaaaggcaaggaaaaaaaaaaacttgagagcaaaaaatccatggcaacaagcatcttctgtttatggatagcatcccagggaaattaagtgtctggctgctagagagtagaagcgaagtcaaagtcatctgtatctgtttacttttctcagattgagcgaactgaaagcccatacctgttctatatctccaccagaagtaaatacttgtatttttgtttgacaagacataagcccaattgtttcaggagttttgaataaagatgataacatatcattatgattgttggatgacagactggctttccatagcatggattgccaagaagggagggcaaaatgaaataagtgggtgttggtaggtataggttctaatttctagtaaaaatcactattgtgttttcatttaaactgttgactgtttttacttctttgattctctttttaaaatttataattaatttcaaacccacaaagtaaactgaaccatcctcaattatctctaaataaggtaaacatttttattttattttattttatattcattttagagatgaggtctctctatgttgcccagcctggaatgccatgtctattctcagaaggaatcacacttccttttttttttttttcctttcttttttttgagacggagtctcgctctgttgcccaggctggagtacagcagcacgatctcggctcacagcagcctcggcctccagggttcaagcgattctcatgcctcagccacctgagtagatgggactacaggcacctgccaccaagcccggctaattttttgtagttttagtagagacggggtttcactgtgttagccaggatggtctcgatctcctgacctcatgatctgcacgcctctgcctcccaaagtgctgggattacaggagtgagccaccgcgcccggccgagcaatcacacttctgatcaccacaggagttttgacctgctccttttccaacctgggccagttcaccccttcttaggcaacctggtggccccctgctcctgggaggtcctatattgatgccaaacatagcgcgcaacagcccagaactcccggacttcagcaatccttttgtcttagcctccaaatagctgggactgcaggtgtgcaccacagcacccagccatacttattttagaatttatttcatgtgttctattatttcagttcttcaaatgcaaattcttcacttgttgcacaccctctcacacatgttatttattactgtgaagtcaacttcaggaaggggttttctgagagtcttatgtgcttgacctgcaaaagtcacataactgaagcccctgctggtggtttattctcacccaagactctggacccagctctcatctctaaccagaatcacccccaggatccggcacagacaccatttacaggtgtgtatgtcagagctcatctctcagacaggctcaggtccagagagaaaaccaacaaataccgcaggtgaccccaggtgtttttgaagtcattaccccctccctgagctctggtgcctgtcctgaaactccttttgcaaatgaagacatttacatttcatgtcctctgcatcctcctgccagggccttcggctgatcaatacttttagctgacaatattccccacaagctaaagaaatggctctctcaccatagagatgaacagaggcttcttcatgggtttactggtgatatcaagtttccattttacagccttgtgaaagcatttagaaaaccatgattcctaagtagtgtgaatagaaaggaacctatttgttatgctgatgtatcctcctctatagactcagggatagcctgactttagccatgcacaccacactttctttgctgccgtgtgtgggacccaggtaagaaggctaaagagatggctgacacagaggtgaaggagggaagaaccactagaaacctcggagttggtgcaagaggcaagatacaaagagaaggaaccagaccagccacccaggattactgaatgatgattacagaagcccagaataggaaggcacccgggaggctagaggacggaatttggaggctgggcacaaggttgtgggcaggtgtgcaggtgtgtgggtatgcaggtgtgcagttgtgcaaatgtgcaggcgtgtagttgtggaggtatgcaggtgtgcaagagtgcaggtgtgcaagtgtgcaagtgtgcagttaagcaggtgtgtaaatgtgcaggtgtgccgatgtgcaattttgcaagtgtgcagttgaggtgtgcaggtgtgcagttgtgtgaatgtgcaggtgtgtgagcatgcaggtatgcaattgtgcaagtgtgcaggtgtgcgagtgtgcaggtatacaggtgtgcaggtgtacaagggggagcatgggagacaggctaacctctctgaggcctcgttatctgacaaggtcaaggttccagcattggccaagaggttgccatcactgcagccccctcattgtggggaatcctggggctctgggaccacagttggatctccatcagccctgctgatggactacattggctgaagggaatgcctggaactagaagacatttccaggctctgcaatacagcagcccaggaaaactagaggctcctcaatgaggagaagcagctaagcccagccctgccagggtcctgtgcctgctctgctcagtgagtgccccctctcagggatgatctggtcctaacctcttgggtcattttggtgaaatgagagttcattcctgcagaggtcaggccagaaaagagagggggaacaaaattccagagacaggaagagtggtggagtgacaaagggccctgtaagaccccaccacccgaaaaggaccctgcctgctgccaaacggcagattggtgagcaagtggtttcttgcagggcatctataagtcaggagcgggtgactggaggtgcacctgacaaacacacccagcctgagatacccagatatgaggatgtgaggtagggctttcctaacaccggctgcctctgagccctccaggtctaatcagttatccaaataccgaacctgctcaaatggcatggtttccacctgggccaggggccgcacggggtaaaggcgtagcatgtatctgctgttcattctgttattcaaccaacatttgcagagagtctttcaaggggcggcacagttctattaatttttttatctttatttatttagagacagggcctccctctgtcacccaggctggaatgcagtggtgtaatcatagctcactgcagcctcaaactcctggtctcaagcaatcctctcaactcaacctcctgaatagctgggactacaggtgcacatcaccacatctggctaatttttttcatcttttgtagagatgagctttcaccatgttgcccaggctagtctcaagctcctggcctcaagcaactctactgtctcagcctcccaaaatgctgggattacaggcatgagccactgcaccagcagggcatggttctggggttcagtgtgaatgagacagattaagacaccgacccgtcctcatgaagcttacattcaggcaggagagacaatacaataacaaataaacaagaccatttcagagatccttctgaatgctaaaaagaaaataataaatgttattaatagtggcatataaagtgacatgggggtggaggtggggcagagttggtaaatgggaaaagtgcctcacacaaggtggtttggagctgtgatctgaatgacaaggagaagccaactgtgaagatgagagggaagaagtttccaggtagagtcacagcccatgcaaaggccctgaggcaagaaagggcttgaggagttccaaggactggcagaggccagggtggctgcagccttggggaaggaggaggagcggggatctaagagctgccgaggagaggaaggccttgggctgtggctacagctcaagcctactctgggtgcagtgggaaaccgttaaccaggtttaaattgggagtgatgtgatcaagtcatctttttaaaattattttttgttttattattatatatttttagagacagggtctcactttgccacacaggctggagtgcagtggtgcaatcatagctcactgcagcctccaactcttgggctcaacagatcctcccttctcagcctccggcctacagacacacgccaccacacccggataattttttaaaaaattttaagagacagggtctcgctgtgttgcccaagctggtctcaaactcctgagctcggctgggcgtggtggctcatgcctgtaatcccagcactctggaaggccgaggcagaaggatcacaaggtcgggagatcgagaccatcctggctaacacgatgaaaccccatctctactaacaatataaaaaattagccgggcgtggtggtgggcgactgtcgtcccagctactcgggaggctgaggcaagagaatagcgtgaacctgggaggcggagcttgcagtgagccaagatcatgccactgcactccagcctgggcgacagagcgatgctcttgtctcaaaaaaaaaaaaaaaaaaaaaatcaaactcctgagcttgagcaatcctcccacctcaacttcccaagttgctgggacacaggtgtgagccactgtgcctggccatcaaatcatcttttaggaagtcctctctggctttgtatgaagagtgggctacaggggacgagagaatggcaggacaccaggtacagggcaccaggtgggactctgtagcgttagtccaggagaaaggggatgcaggctgagctaggatgggagggacagctcgcatccctctcctggagtacttcccaaactgatttaatgacagaacgctttcaccctggtgctgccttccagctgtccctgcagcatggcaagaaggagtttgctctgctcacttcagctaaattcttcttcacaaaagcatctcctttgctggtcttgcctctgccagttggtctaggcataagcctatgtgctgtgtttacttaattacagaaaacaattattctggaatcttgggacacttaggcactgactttacctttcttaacataaggactcagaaaagaatttagaaaatgaaccaaccccctaatcagatgcctgaccaaatgtcctggaggatgctggaaatggggataacattttctttccttttcttttcttttttgagacacagtgtcactctgccgcccaggctggagtgtggtggcacgatcttggttcactgggacctctgcttcccaggttcaagtgattctcatgcttcagcttcctaagtagctggattacaggcagccgccaccacgtctggctaatttttttttttttttttttttttttttttagtagagacggggtttcaccatatcggccaggctggttctcaaactcctgacctcaagtgacccacctgcctcggcctcccaaagtgctggaattacagacattagccactgcacctgaccaggataacattttctgtccatgagcagacccttgttttttctcttgagtctttttttggggggtggtgcggggaatatcattaggatgggcaaaactctgtaaaagtgatgttagcacagagattcaatggtgactttaagtgcaaattatatactttaaaaatacaagccattattctaatcaaaataattgctcatactatatgtgtgaagacaggtgaaattcaagagatacagtttgcctgtggtgggatcaattatcagaactcactacgctacagtgcacttcttttattaccaggagcaatagattttgcactaaagattctcacttaaatcctactgctatgcatcatctgcaaaacatgacactaatgtaagcatcttagaaaacacttacatgtacacacgtaaatagtgggaaaatcaactaaactgaaatcagcaaagttgttgctcttcagggagtgaacaaaaggtagctctgcgaacaaaggtacattggcaccttcaacagttaaatggcttaccatcccaaactgaacgcaggactaatgtggaatgatgtcacggggccccacaaccatggcagctccttggattctggctccaggctcagatctgctgctgagcccaggaatacattttattttatttcatttcatttcattttcatttcatttcatttgtttttaattgaggcatggtctccctctgtcacacagactggggtgcagtggcaacatcttacctcactgcaacctccacctcccacgttcaagcaatactcccacctcagccacccaagtagctgggaccacaggcatgcctcaccgcacctggctaatttttttttctttttttggtggagacagggtctcaccatgttgcccaggctggtctcaaactcctgacttcaagtgatccgcctgcctcggcatcccaaagtgctgggattactggcgtgagccaccgcgcccggccccagggacatgttttagagcccatctgacagcacacaaaacatatctcacacttccagattgaatggaatttgagagttaaatcaattgccttaaactgtaatcctgcaatgtaccataactgaaatattgtgaaataggctgtgcttgaataactgaagcctgctagaatttacacattaaaacccaattatgacaactggaaaggcctgtctactacttcagccccgacctgtgacaaatataatctcttgttctatcaataaaaggagaggacaaaggaggcatgtgagcatgtggcacttggtttttctgcttgttttttgttgttgttgttgttgttttgttgttttttgttttttgtttttaagatagagtcttgctcctttgtcgcccaggttagagtgcagtggctcaatcatagctcactgcagcctccagctcctgggctcaagcaatcctcctgctcaatctcctgagcagctggaactatagacattccacacctctggttaattttttgatatttttgtttcaccatgtggcccaggccagtcttgaactgctgagctcaagtaatcctcccactttggtctcccaaagcattgggattacaggtgtaggccaccgtgcccagccagtttttgctgtgtttctaaacacagcatctcctgctgccaaacaggagatgatgtttaggcacaggacctagaagatattgtgcatccagacaggcactcatctttccacccagaaaaaagagctcaagtgagttcagttcacagcctttcaagggaaggaggctgtcgatgctgtttggttcttcctctgtgcatcatctgagccagctcttgtttctgcatctgtagcaaagagagagagttgtcctctgaattccctttccacattgttatgactcttcgcaagcatgagcctatgacccatggggagaatgcaacctttgcccacactttccagagactgcaagcagcatgccaagacagtgccctgcttgagactgtgtgtgtgattttagatcttaaactcttgatgatggctttcatttctgggtaaaactgatgctttcctaagaattccaatagctgcagcaccacagagagatgttcaacagataaagagctggtcaaaatgggataaggcttagcttgctggcttatctcacttcatccctcgccaggtttcctcctctattcctgggacttcaggtgtgtccaggagccacagggaactctcgtgggttggcagggagacataatttccctggggaacagcacagggagactgtctataaggggataggcagaagctctggagcagggacaaggttagtgctgtctgggttttgagcaggtgcctttgctgctgagaccaggacagaggtggggttggacagaggtggccaagggaaggtggaggggtgatggcagggtgttctggggcactgcgtgggtagcagcttgtgctccagcgtcgagtagggtcagtcccagtgagactggcctggctggaaagggaagaggggaggtacagagaaaaacagtgggtgccaaggctggacttaggtattctcaaagaacccaaagagagtgttagtagaagacagcccaaagaccactgcccagaaggaaatatttttgctgttgtatagaatacggctctggaaaaacaaggctgacaaggatgtatttgaatggcatgatcacaccctgaccacagacaaagataacaagctaattcctaagagctgcagttggagaaactgaggcaggatccatggtcacagcacgggatgctgtgctgcactctacagctcttagtactacatggccttctactgctgtcaggtggtgcatgtgtgattctgagtggggctaggggaaacagccttccctacccctcacccctgaaatgaggactcccgtgcttctctgggggagctctgcagcagggttcagcagctgccctgaagtgacaccagggtcctagtggctcagacacactgcagctggctctaccctgaatcagaaaacccagctctgaggatgacttgagcagttaaatgaaagcttatgtcaagtctcggtcccaacttctcctggaagaatctcctggaacttctcctggaagaattaccctgcagttttctcaggcttcagaatctaaagcttctcatttgagatcaaatccaatgactccaaacaaatcaaaaccaaagaagtcttctttctggctaataacaatttttgcgtgcaggtctaaaacttcctgggagcttctgaattcagccttcccctccctgggcaccaattcagcaggggcaggtatagcgctgtcaatgggctccaaagcaaacagacacccacaggacccaggaatcagacaaaagaaagggggcatgcgggacatgcagggaatgttcatgggacagggaagaagtccacaagccctttctctcccggcagctcgttgtcggatttcacctggaatatctttggcctacatccagattaaatgccagttagaaagctctgcccacccgacttttcggggcagacagcaacgatggtgagctctaatcatttacaaaggtcatgatccagagcgagccgcggagcagtcatttaaaattcgattgatccctatttgtagtcagggaaagaaaatgggcacttggactgtattgtaattatgaggcttccaggcaaccataaatagatgtgcaatctcagtactggaaaatatctggaagaagaaattattactctggcatggtacgttgctaggaaaggttgaagacaaaattgcgcataaaaaaatcaatcatcttttagctaatttgcttctctcgccactcatcggggttatcacaattatcagatgtctgccgaatatattatgaggaggatctgctggctgaaaatgatcttcaagaaagcaaaggcctcaaatttggtggggactctggagagctggcatttggggctgggtgggctccaggggccacgagcataagggaagagccttggggtggctcttttggagcctcttgctaagggataggtttccagagttcttgagagcatcagccctgtgtaggcactgcaaataccatctcgatgtccaccctgctggggaaatcagtctgggaagaggaggatctgctcattctgtgagtggcagaagatcaagtggccggcacatcctctgctgcttagtcccatggggctggccctggtacttgacattcataaccttaaccttaaccacacccccgggaatgagtattaccaaccccctattactgatggggaaactgaggaacagcaagattcagaagtgtgcccaagatcacctggaggcatgtggcagagctaagcccagagccacctggaggtggggaccaggggacctggaggtcccaccttgttccaggcagggccacgccagtccagtgcttttagaagaggcgaaggcaggggtgcccactctccacctctgcctctgcctctcttccatgcccctgaagaatctctcccttcgaatccttaggaaccttcaaggctctaggcaaaaacaatgcttgctggatggcaaatgttccccacgggggctggcgagccttctgagtctacttcctgagcctgccatagtccagagggctggccctggttctgtgtggggaggatctctgaccctgactccatggggtcaccccaccttctgagctggtgcttccagcaccttgacatcccagaagccccatgatggcctccagtgggatcaacagagcactctcaggaatgatgccaattaaatcaaggtccccttttctctacacggaaccagccaacaccagccagcagtgccagaccgtgagctgggccaggcaatccccagccaggcaagggtgacaaagaggacagcccacctgggaatcacctgccaccacggaactagcatctaaaggagcgtaatatactcatgtcattctttttaaattttttcttattttttaaaaataattgagatggggtcttcctgtgttgcccaggctggtcttgaactcctgggctcaagtaatccacccgccttggcctcccaaagtgctgggattacagacgtgaaccacagcaactgctcatactgaagtaattctacttctacaaatctatcccagggaaacagggtgtagacagagatgtatgcatggagatgttgatcccaatgtcattcaacaatggcaaagaatgtaagtattcaccactggggactggttggatgaagtaaggcctacgaattgtgtagatattacaccaccattgcaaggctttatatagagtttctagtgctgcgagaaatgtttatgaaagaaggctaaacaactaccgcaacaacaaaaaaaaggaataaaattatatggaaccttgtggaggatgagtgaatggataactatgaagattactagtgatgaggttccactttcctattttttggttcttttcaaaattgtctgaagttcaaatcgaaaccacaatgcaataccactttactcctgcaagaatggccataataaaaaaaaattaaaaaacaatagatgttggcatggatgtggtgaacagggaacacgtctgcactgctggtgggaatgtcaactagtacaaccactgtggaagacagcgtggagattccttaaagaactaaaagtagaactaccgtttgatccagcaatcctactactgggtatctacccagaggaaaagaaggatcatacaaaaaagatatttgcacatacatgtttatagcagcacaattcgcaattgcaaaaacgtggaacgaacccaaatgcccatcaattaatgagtggataaataaactgtggtataaatatacaatggaatactactcagtcataaaaaggaatgaattaatggcattcacagcaacctggatgggattagaggctattattctaagtgaagtaattcaggaatggaaaaccaaacatatgttctaagtgggagctaaactatgaggatgcaaatgtataagaataacacaatagactttagggactcagggggaaagagtgggaaggcggtgagggataaaacactacaaataaagttcagtgtatactgctcaggtgatgggtgcaccaatatctcacaaatcaccactgaagaacttactcatgtagccaaacaccacctgttcccccaaaacctatggaaataaaataaataaaacataaaaataaatttttaaaaattgtctacaattagctaccatccttctcttcccaaatcttgtggccttggagtggtggctgggatcctggcctgccatcctgggtcatccatgccaacagcaactcaggaaccccaaatttgggtttaccagaaggagctggtcttttttaaaaaaattgtgacaaaatttaccctttcaaccatttttaagtgtaaaatccggtggcactaagtatattcgcaatgttatgcaaccatcaccactatctatcttcaaaacttcatctccttaaccagaaactctgtgctagttaaacaataatgctctgttccccctccccagccccaggcacccccattctgcctcctgtccctgtgatttgcccagtcccgcacctcctacaaatggaatcacacagtctttgtccttctgtgtctggctcttgcacatagcatggtgtctccaagatttgtcccaccccgtccctacctccatttaattctcattaaattcaggacgggcagggctgttcccacttaacagtgggagaaactgaggctcacgaaggttgagccaggacttgttctcagtttgaccctgagtccatctcttgctgcagccgcggagacctgctgagcacgttccagagttaggcgaggaaggagccgtggtgggtgtggcctctccagtcgtgtcacctgtgccgagctgagtgtttgcacgtccctccaccccgactcctgagaataaacagtccattcgccctaaagctttcctgaggtcacaaaggtcttgggcaagactcccagcttttctgggcagctgggccccagctggttccttcccagagcccggctctgacaccctgcccactcaatcctgcttcccaccctcagggaggcagacgcgggcagacgtccttgccctcacattggcccactgccctccccatgttcttccctctctcagcagcatctcgaggcccctcgaaggtgtcagacccagatggctgacctcctgtacatggggagggctgggctgcagccctggggcccctcgacagccaccttcacccaaggttaccaaagtgctgtgcacactcacccaagggtcccagccagccgccatagcaagcagaacagcttctgtgcagcccccgtcaggagccaccttgaatcttccttcaaaccagtcctccaaagggacctggtgacgctgggccccaggggctcactgtccccagaaacaggccttctcccagtcctggctgtttccacccaccctgggaagcacccccactctgaacactctatcatagcaatgggggactttgtgaaaattgtatccctagtaaagataccttctccacaaccgaatcagaacagttcagtaatgggtagagtccccttaaacaagtataatacctgctaacaatgctcacctcacattacctgtgaggtaagcaattatcaattttccactctatttccacaacacattacattactactgaggcacatataccttagaaatgatcatttcctctttctctctcaggtgtctctttctctcttttattattattattattttagagacagagtctcgctgtgttgcccagagtggtgtgcagcagtgcaatcacagctcactgcagccttgaattcctgggctcaagtgatcctcccagctaaacctcccaagtagctggactacaggcgctcgccagtaggccttgctaattttgtttttacttttgtagagatggggatctcactgtgttgcccaggctgggcttgaactcccagcctcaagcgatcctcctgcctcagcctcccaaaatgccaggactacaggtgcacatcaccatgcctagccttgcatatcattttagtcctgtagtgattaagccaaaaatccagacaggtggtccctgtgatactgtgatgcttgcctttgctccaatctctcccagcatccccagcttggacagccgcgggagtctcttcaccagcctccctgcctttccccttgccccctttgaaaactatccccctcacaaaagcctcccaaagcgctgggattacagatgtgagccactgcgctcagccagctttgtcctttgataacctctgtatcttcagggactatgacagattaggtgctcaacaatgtttgttgactgactgatggaatagttgtttttttgttgttgttttttttttttgagacggagtcttgctctgtcacccaggctggagtgcagtggcacgatcttggctcactgcaagctccacctcccaggttcacgcccttctcctgcctcagccccccaagtagctgggactacaggcacctgccaccacacccaactaattttttgtatttttagtagagacgggtttcactgtgttagccaggatggtctcgatctcctgaccttgtgatcctcccgcctcggcctcccaaagtgctgggattacaggcgtgagccactccacccagcctagtcggggtttttttaagtccacattttatccaaggctccccttggcctctgccccatccttctgctcaaaggagttgtcctcactatcttagtccattttgtgttgctataaaggaacacctgagactgggtaatttctaaagaaaagaggtttatctggctcacacttctgcagactgtacgagaagcatggtgctgacatctgctaccagtggggcctcagggtgcttccaatcatggcagaaggggaaggggagctgtgtgtcaactggtgagagaaggaacacaagagagagaaggtgctagggtctttttaaccatcagatttcgtggtaactaatagagtgagaactcactcattaccaagccattcatgacagatccatggccatggcccaaacatcttccaccaggccccacctccaacattgcggattacgtctcaacatgagattcagagaggacaaaacattcaaaccatgtcacttattgtcttacccgttctgaaggctcccaaagcttctgctgtgtcctgggtcaacctgcccggaccccccaggggatgcaaatacaacccattgctgactcagcattgtctcttgggcccctgctcttgtcactgggtttctcccccaagtacttgcccaagccagaaactcaggagcctgaagcaggtgcaatttttttttctttttctttgagacagggtctcgctctgtcacccaggctggagtgtagtggtgcaatcacagctcactgcagcctcaaccttccaagcccaagcagtcctcccaccttggcctcccaagtagctgggaccacaggcacatgccaccacacctggataatttttgcttttatagagatggggtctccctatgttgcccaggctgttctcaaactcttgagctcaagcaaccctcctgccccaacctcccaaaatgctgggatgacaggcatgagtcaccgtgcctggtctcagatgcattttgtgtcccccgcttcttgtcctttcgagagacaatttggaggcgtgtttcacatggagtcccctgcagggctgcaggctccagcgcaattgcccacctttacaggggtctcttccctgccttgctctctctgtgttctctctctgggctcccctccaacacccgcagttgagtctccgactcactttccagggcacccactgtgatgtccccctggatgcttcctttcaccaggcacaaccagttggtccccagtctggtggattccacccctaagtctttctgacactgtctgaattcattttctgtgtctgctgtaactaattaccaccaactcaatggcttaagacagcagaaatggactctctcacagttctggaggccaaaaattcagtatctgtgggctggaatcaacacgttggcaggctctggaggagaatctgttccgtgccttttccagttctatattccttggctggtggccacatcactcctgtctttgctttcatggtcacagcgccttctcctcttctgtccgcatcaaatctccctctgcctccttagaaggacatgggtgattgcatttagcactcatctgcatgatccaggagatgctcctcatctcaagagcctcaacttcatcacatctacaaagtcccttttttttttttttttcgcccaggctggagtgcagtggtgtgatctcggctcactgcaagctccgcctcccgggttcatgccattctcctgcctcagcctcccgaatagctgggactacaggcacccgccaccacgcccggctaattttttttgtatttttagtagagacggggtttcactgtgttagccaggttggtctcgatctcctgacctcgtgatccgcccactttggcctcccaaagtgctgggattacaggcgtgagccaccgcacctggctttttttttaatttttttttttattttttgaaatagtctcactccgtcacccaggctggagtgcagtggtgctatcttggctcactgtaacttctgtctcccgggttcaagcgattcttctgcctcagtctcctgagtaactgggattacaggcatgcaccaccacacccagctaatttttgtatttttagtagagagggggtttcatcatgttggccaggctggtctcgaactcctgacctcaagtgatctacctgccttggcctcccaaagtgctggaattacaggcatgagccactgcacctggccctccttttttttttctatataaggtaaccttcatagattccaaggattaggacctgatatctttgggaagcattattcggccgccacatgtcccaccgtcactcccctgcccccaactatcatgaacgacctcctgtttggccccatcaaatcccagctataatcagagacatctttctgaaggcaaatctgctccagtagctccacactcaaagccctcgtctggctttctgctgcctgcaggacatggagcccacggcctagccaggccccactccctctctgcaccagcctctcccaccacagctcccagtgcctcgagggaccaggaaggctctgctgccccgtgcatgtgcaaggtggggggcacagctccagctgactgcaatcaagtgggaatgcagatgcaggagttttaagagaacccagaaatccaggtttggtttgcttttagttttagtgtgaaaactgtctgtatttatattctgacatctaaagaagaaaatgtgacatagcacaggccacacaaagcagtcttccatctgcccctttgcaacctctgcaggagcgtgtggctcccttccgtcactcagcctctgcctgctctcaccccttgctagaaacaccccctggccctgtcctctaccccctaatatgccccttgcctaatgagccctaactctcccttgtcctctgcgtggatgccatcttcctgaagactgaccaaggtattctcatgggctgactcccatcctggctcacatcaccccgaagagatgacacctacccagggtctctgtctcccacaagaccgggagcacctgcagggcaaggatctatgcccccacagcctggtacagatatttgcagaattatgaatatagttctctcccttaggaaaacaccaaacattttattttcagggtgtagccacaaagttaccaaatttggaagcaaaaacatgagttaaagttcttccaaaatgaattcttaaacttagacttaagaactgttggctactcttgcaaaagaccaataggaaagatgagagtctgcctgcactttttgggcagagtcgctattcactgactgtcaggatttgctgccagcacttggaaggcccaccaagccttccgtagtttggatatctgcatccgtttgcactccgctgtacagccccatgaagaatagagtccagcagcaccactgctcttgggctcttgggttgacagactcttatccaagtcttttttttttttgtagatggagtccggctctattgcccaggttggagtgcagtggcacaatctcggctcactgcaacctccgcatcccaggttcaagtgattctcccggctcagctcccccgagtagctgggactacaggcatgcaccagcacgcccggctaatttttgtatttttagtacaggcagggtttcaccatgttggccagctggtctcaaactcctgacctcaagtgatgcacctatcttggcctcccaaagtgctgggattacaggcatgagccactgcacccagccaactcttatccaagtctatcaacaccatggtagccaacattaaccattcttatgagtgtaaatgacacttatctgccttgtgtgcaataccttgaacctacctggcatcatggcatcccaacccacctattgcagaggaggtgaacatcaccaccttaggagaagcaagcagctagaagtttacaacactggtattcattatgactgcaaaggaataccatcaaatttagaatgcttcctgactccccatcccccaaaacttccattgaaagagttaattttacaataaccatcacaaaggactgaagcagaagtccagcaattaaagtataaaatcaattagcatagaagcagagcctggtataggtgaatttggaggcacaaatttgaccaaaacaagcgggaacagttgctttggaaagagtctgacaactttgcactttccacattgtctgccattaacatgcagtacctttataatcaagcaaatggtgaaatatttaagtgtctggagaaacagttattcagttagcagaagcctcccaacagcccacggagctgctggactccgggagcagcagagggatggggcgagcctttgccctgcagggggcacagcgcggacttgggaggcaaaagcaccaatgtgtggtgcttagatacctcccaccccagaggcagctggtggtgtgaggaccgtctggggcggggccataagcacagctccaggtccagagacggatatgggggtgggggtgtcggagagggcctcatttctaggagtaaatcttgagaggctttcagttgcttgcttgctttatttatttatttatttatttatttatttatttatttattttgagacagagtctcgctctgttgaccaggctggtgtgcagtggcacgatctcaactcactgcaacctcagcctcccacattgaagcgactctcgtgctttagcctcccgaagagctgggattacaggcacccgccaccacacctggctaatttttgtatttttagcagagacagggttttgtcatgttgcccagggcggtctcgaactcccgagctcaagatatccgcccaccttggcctcccaaagtgctgggattataggcgtgaggcaccgcgcccagccatcagctgctattttaataccgcttttatttcactgtggtttttttttttttcatttcacctcttcactttcttgtaactcatgctactgaagcaaattacttgctaaagaaacacagcctagcatcgaggcattctttaaatgcagcgagacacaggttttaggctgagtaccaatcccctggaagaggccccagccacatgacccttctggaggtgcttctctgaggtgccctggggctgtgagtgatcgtgtcagtgcccggcatgctgcctggcatacataggtgatggctgaatgaatcttgaaggattagagatgctacattttgggtatttgaccttccaaacctcatgttgaaatgtgatccccaatgctggaggtggggcctggagggaggtgtttgggtcatgggggcagacccctcatggatagatgaatgcgctcccagagtggtgagcgagttctcactcttcttagttcctgagagagctgggatcatttgaggtcaggagttcaagaccagcccggcctactaaaaatacaaaaattagctgggcatggtggcaggcgcctgtaatcccagctacttgggagactaaggcaggagaatcacttgaacgcaggaggcagagattgcagtgagccgagatcacaccactgcacttcagcctgggcaacagagcgagactccatccccccaaagaaacctcaaaacaaacaaacaaacaaaaaatactaacatctttcccctctctctcccttcttctcttgccctatgatctctgcacaccagctcctctttcccttccaccatgggtggaagcttcttaaaggcctcaccagaagcaaatgctggcaccatgcttcttatacaagctgcagaaccgtgagtcaaataaacctcttttttttttttttttttttttaagagacagtgtcttgctcttttgccccagctagagtacagtagcgggatcatagctcattgtagcttccacctcctgggctcaagcaatcctcctgcctcagcctcccaactagctgagcctacgggtgtgcaccaccatgcccagctaattttgtttttacttttgtagagatgggggtcctgctatgttgcccaggctggtctggaattcctggcctcaagcgatcctcctgacttggcctggaaaagtgctgggattataggcgtgagccaccacacccagctctcttttctttaaaaatgacccaaactcagatatttgtttatagcaacataaacagactaagacaacagattatatccaagcttcttctctaactgaaaacagcaaagcttaatgctggttgtgaccaccatggagacagagtagagccttgacctctctcgacctttcccagggagaagagactaagcagattatttgagggctgctggcatccactaagtcaatatttagacatcatattgagcctctctgtgtgatctggaaagctccctccacagacaggacttgtctgaaaaggagaaggtggtttcactcccatggaggtgccccaggggtccctgagttagaaaggggcctggctctgtgtccctggcagcctctccctcatgcctggtacaagctggaccagtcaccataacaaagagggacttgctttaaaaaaagaaaaaaaaaaaggtgggagacacaccatatgaaattgatggggatgccacagtttgcaactgccatttcacaaccactttagaagaagcagtgtgttctggtggtaatgaattcatcatcgtattcagcaccacttggacagtgggtgggaatgtggctggattttccatttccatggctgtaaaccagtaagctgtgaagcaggaagtctcacatagctacaagatgcaactgctagactctagaatagaagggtattaattcactattatgctgtctcctgagctggaagcttcctcgtggatagccctcacctctcaccactcagagacctcagaatcttccctcaggctgtgctggttcaggccctggtgagatcttgcctggttggtaaaatagcctctaccatggcattgcacaaagccttagaaaataatgtgaaaagcgcccctagcgttgtacagctgcagtcagcagaagtctcttttataaatgcaaatccaaacctgtttatacttggccctaaatgctgcagtcctcattgccctgggccctaacgcacaccctccaggctcattctctgggtcagaaccttagtgagtccctgaacacaccatgcacattcacctggccttgctcttgaacttgctgctcttcgtccagagaacccttgccctccattctggtctaataagcccctattcattctgtaaaactcagtgccagtgccacgtttctccacgatgccccctgctcctggctgccgctttcacacttaacaatgagttatctacctttgcaaatatgcattgcttctgcctggctcttgcaagcttcttacaggcaggagatggtgtctttttcacctttgtatccctggttatttgcaccaactctagcaaagagcaggtgccagatcatgtcggaggagctgaactaggtgtttggaagtgctgcatgagggtctgtgcttacaacctggatcttcggtaaaattctcgaggtcagacaggttgaggctctaacagaggtggctgcttttgtctgtgagattcctggcgggtcagtatctatccatcatcaccctcctgtttttttttttttttttttttagacaaagtcttgctctgtcgcccaggctgtagtgcagtggcgcaatctcagctcactgcaactactgcctccagggttgaagcgatcctcccacctcagcctcccaagtagctgggactacaggcatgcaccaccacagccagctaatatttgtatttttagtaaagacggggtttttattggccaggctggtctccaactcctgacctcaggtgatccgcctgcctcagcctcccaaagtgctgggattacaggtataaaccactgtgcctggtggcctcccttctttactccctatatctgctggttcctgcactcagagctggaactgtgcagagggcaaatgtgtcaaagaaatcccacacactcctgcatcctcctaaggtgtcccacagacctgcctgggttcctgctgagccaaaaagtccatctggggtgcccacacgttgacccctctgcccatccagccagagctcaacagtgcacatgctaagtacttctgcacccagaagcacgaccaggtcacatttggaggctggaatggcagccctttgggacttgaccctatctccctgcctttgcagccatctcttctctcactcacccattctctggccttcccaagctactcacactcccgaatggaccatgcattcccaccgactgtacccccatcctgcaaggccttctgcacctggcaagctctgcccattccccaggagccctcacaagtgtccctccctctgtgacttctgtcctgactcgcctcccctctgctgacttaagggctttggagcactcaccaccgtatgctagtgatttgctgcttctccattgcacggggcccatgaggccctgaggacaggaatggtctctgtgtcctgggtttccctccaggctggggtggtgttctgcatgcagcctgcgctcaatttgtgctcgtgggcaccaaatcagatgctcagaatggtggaaagaacattctagaaaacagctactctggtccatccacacccttcccaggaaaagaagatattgatataaaatcttttcctttctctaaagaaatatttgcaaatcttttgccaaaatctctgtgagtgagcatgtacaattgctgcaaactgcaatgaatgagcaaaaaggttaattttcactcccctgtctgataacagggttattgaatcagactcctcagcagagaccctcagaccaccgggctgagcccctcagctttttttttttttttttaaatgggaaaaccacacgtttaaggaccatccttcttttcaccaatgagaaatcttgagcctcttcctagtcttgtttcactaaaacactttattttaatcaagtacttggagagaaagctgctgaaacttattcaaatgcaacacttaattttaatcaagtagttggggagaaagccaatgaaactatttccagagtatcctatacagataggaaagaaggtaacatgctgttcagaggcactgctgtttctgtgactgggtccgtagtctaatacagccaaaatattattatttaaaattaagatgttttttaaaaaagacacaaaacatctaaagcctccattccaaaaagtggggatctctattacaaaagaatacctcaatcaaagttacctgctatgccctgtctcttctcgagcagacaggcccctgggggaagctggggagaaggagattgttccagaggcctggcttccagaagcttccccctctctccatgcaagcaaacaacacaccactggaccaggctccagcagctaaaataaaacagctgtgtttctcactcaacaccctcttttaccagatgaagggcactgattcatggaaaggagacaaatatttcaggccattttttcagacactgacaaggagtaaattaggaaatcatgtaagtacaatgcgcgcgtcatcgcttcctattgatcacatgtaatttacatcttacaaagatgtgaattcttgcattctcactccacaaggaaaatctcgatgatttattcatttcaaatgaaaaatagaaggtagatgagaagaatgacttcacagactgcatcgttctcggggcactggtgcgaggctttctcatacactgcccgaagggctccgtgtgcaagtccctctaattaacaaggtgaatcacgctgcagctctctaattagtgagcctgacaagccagcggaaacagccaggcagactggtatacatcgctggccgacaaaggcacggcacattccaagtgaaaaatgcagatttctccgaaataactataaaaagtaagatggttggggaaaaaaaagacccacctaattttaattctcatgtttcatgtgcagttcttatttgctctcatgcgtaaccagctccttggtaagatgagatttgcctacgctctttgaaccacctttccagggaaactatcctttaaaacagatgcatttttaatgttattttattgtggtaagaacactcaacatgagatctaccctcttaacacattttttaagtggacaatacaggattttttactacagagctctagagcttattcatcttgcttaactaaaactttgcgctgctcatgcctgtaatcccagcattttgggaggctgaggcaggaggatcgcctgaggccaggagttcgagaccagcctcggtaagatagcaagaccacgtctctacaaaaaaattaaataaaataattagctgggtgtgattgcatgcacatgtagtcccagttacttgggaggctgaggcaggaggatctcttgagcccaggagttggaggctgcagggagctatgattgcgccactgcactccagcctgggagacagagtgagactctgtctcaaacaaacaactctgtgcctgttgattagtgactgcctgtttctccctcccctcaggcctggaaaacacccctgcacattttgattctatgaatctgacaattttagatacctcatgcaagtggaattatgaagtatttgtctttctgaaaacacaggtattttggcttgatataagaatcagtgtctcagttggaaattcatgatcttctgtatgtatttttgtccaacatgcagtaccttctagaattattcctacttctgccaaaaccagagatgtctgatgtcaaacctctttgtgatttacttggtgccattcagtcagtcccacagcacaccctacaaggagccctcaaaagccaggaaagggtagaaacttctactctccaaagaggggtggtacccatggttcctgagtcaccagcctggctcacaggtcccactggagacaggcctggtgcactggccatttgccctgattttaattgtctttgctcatctgccaaccggaggctctccttctgtattagtcagggttctctagcgggacaggactaatagtatatatatgtatactattatatatatatgtatatatatacacacacacacatatacatatatacatatatatatataggagcttattaggtagtattaactcacatgatcacaaggtctcacaataggccgtctgcaagctgaggagcaaggaagccattccaagtccccaaactcaagaacttgaagtctgatgttcaagggcaggaagcatccagcatgggagaaagatgtagcccaggaggctagtccagtctactcttttcacgttcttctgccagcttttatactagctgtgctggtagcttattagatggtgccctcccagattgagggtgggtctgcctttcccagcccactgactcaaacattaatctcctttggcaacatcctcacagacacacccaggatcaatagtttgcatccttcaatccaatcaagttgacactcagtattaaccacgacaccttccatgatcattagctaggctttctgagtgggcccagcagcttgggaggtgtcctgggggcagctgccaggtgacctctgatatggtttggctgtgtccccacccaaatctcatctcgaatcgtaatccccacatgtcgagggagggatccggtgggaggtgactggatcatggggacgatttcccccatgctgttcttgtaatagtgagtgagttctcatgagagagctgatagtttctaagtggcagcttcccctgcactctctctctcctgccaccatgtgaagaaggtccttgcttccccttcaccttccaccatgattgtaagtttcctgaggcctccccagccatgcagaactgtgaatcaattaaacttttttctttcacaaattacctggtctcgggtagtatctttttttttctttttttttttttttgagatggaggctcactctgtcacccaggctggagtgcagcagtgcaatctcttctcactacaacctccgattcccaggttcaagagattctcgtgcctcagcctcctgagtagctgggattgcaagcattagccaccacacctggctaatttttgtatttttagtagaggcagggattcaccatgttggccaggctgttcttgaactcctgacctcaagtgatctgcctgccttggcctcccaaagtgctgggattacagacgtgagccaccgcacctggccattggtagtatctttatagcagtgtgaaaacggactaatacaagctctctccctgcatcagccaagtttcgcaggcgtggcctgcagtcacccacagcacagggatgtgctaagagctcaccacagcccacaacagtggggaaaccaccgctcatgttcacctccggtcaattgctccagaggacatggccacagctgctcccttgcaggctggtgggcttgacctcactgagaactgggaatgacctctgcgtccttcacattccagcagcttccagtggagcttggaaggtattttcttttagcattggagaccagttctttaatggatggaaaaaaaaaaaaagtcttgtgaagggaagacttagattcagattcaatgcacttttattgaaccctccatgccagacaccatgctgggaattttctctggagtaggcattgatgttgctactgttttataggcagagacattaggtgtcgggagtgtttaaaattgtgcccagagcagttaggaaatgaagagaagagaagcagaatatgaactctggggtttagaacccagtctgcacccgcacctccctctttgttttaagactcgtgttccctggctctagacttacaaaccgtaggttgtcacttcacaaaattcactgctcttctcagccaagaccagtcacagcagcacactctaatgccagtgagcaaatcagcagttctttgcaatgaatggtcttcctgcctctctctggggagaaataggaatgacaggtttagaaatgtggggacccttttaaggacagccttatgcctgcagcatgactctccctgaaagactgaaactggcaaaacattatttcaaggcaaatatatgtgaaaaagatctgagaagcgtcaccaaaaggaggaccagtcaaaagaagaagccaaagggaagctatggctacgtgggaggccacatttgctcccactctgccaccacctggggctctgccctcctgctgcaagccatgcggctcccaggtttaaattttctatgagtttttctctgcatccaagcaagatcgccacacaccttctcttccctcgaactctccattcagaatcatacagtatctcattttcagcacaaacttaacatttaagagtttccaggccaggtgtggtggctcacacctgtaatcccagcactttgggaggccaaggcaggaggattgcttgaggccaggagtttaagatcagcctgggaaacatggcaaaaccccatctctacacaaaatacaaaaattaggcaggcgtggtggtgcacgcctgtagtctcagctacttgggaggctgaggtgggaggatggcttgagcctgggaggttgaggctgtagtgagccatgacagcaccagtgcctccagtctggatgacacgagtgagacctcatctcaaaaataaataaaataaaagtttccaagccagaggggtggctcacacacgtaatctcagcactttttgaggttgaggtgggaagattgcttaaggccaggagtttgagacaacctagtgagagcctgcctctacaaaaaattaaaaaattagctgggcatggtggcatgcacctgtagttccagctacttgggaggctgaagcaggaggattgcttgagaccagggggttgaggctgcagtgagccacgatcacaccactgcactccagctggggaaatggagcaagaccctgtctcaagaaaaaaaagtttccagcacacactggcccacaagagcagctgtcactgaggggagatcaagggcaagaatgtcacctgtgtttctctgtagccttcacacacttgctctaccagctctgcctgcagaagccttcctggccgacttccactgtccagtcttccatgaagctgtcccctggtcacccttattgccaactccctgccagagcaacttctccttcttctggatcctgtagattttcaatggctctttcttgagacatttaccacattggctttatactgttgtattagtctgttctcacacggctgataaagacatacctgagactgggtaaatcatgaagaaaaagaggtttaatgtactcacggttccacgtggctggagaggcctcataatcatggcagaaagcaaaaggcatgtcttacatggcagcagacaagagagaatgaggaccaagcgaaaagggtttccccttataaaaccatcagatctcgtgagacttattcactaccaggagaacagtatgggagaaactgcacccatgaatcaattattgcccacagggtccctcccacaacacatgagaattatgggaattacaattcaaggtgagatttgggtgaggacacagccaaaccatatcaaccatcatccgtgtaacagatcaaagatgtactttcagacagccagattgagctcagattctacctctgtcaatttctagccatgggaccttagtcacagccttgggtttctgttttcttatctgggaaaactagaaataaccctcctacctggaaaagctatgaaaaggattaaatgagaaaaagctatgaacaagcttcatgtgatgtctggcagagagaggtgggtgctaaggaataatttaacatttttttccttatttctttccttccttcctttctctttattttgagataaggcccctctccttgtcacccaggctggagtgtagtggctcaatcatagttcattgcagcctcggactcctgagctcaagcgaccttcccacctcagcctcccaagtagctgggactacaggcatgtgctaccacacccagctaattttttctattgttttttatgccatggggtctctctgtgttgtccaggctggtctcaaactcctgggctcaagcagtgccccctcctcagcctcccaaagtgctgggattacaggcttgagtcaccacatccagctaaatattaatttcatttttggaattgcatggcgatatggtttggctgttgtccacccaaatctcatcttgaattgtagctcccacaattcccacatgtcgtgagaggaacctggtgggaggtaattgaatcatggggctggatctttctctgctgttctcgtgatagtgaataagtctcacaagatctgatggttttataagtgggagtttccctgcacaaattctctcttgtctgccaccatgcaagatgtgccttttgccttctgccatgattgtgaggcctccccagccacgtggaactgtgactggggagttcacaatataaagttataattaactttataaattacccagtctcatgtatgtctttatcagcagtgtaaaaatggactcatacacatggtgtaacgaaaaggtgatatattgaaacttcaattatgtccgataccaaacccgcgtcagtcataaaccagctgttggcctagtacaggacactaagcccatctgagcctcagctttctcatccagaaatagggctaaccatacccaatccacagatgtgctttcctgaagtagcaggtgccagagcctttagcacaggggacatccaataaatgtcagtcagaagcaaggactctcggctgggtgcaatggctcatgcctgtcatcccagcactttgggaagccaaggcaggcggatcacatgaggtcaggagttggaggccagcctggccaacatggtgaaaccccgtctctactaaaaatacaaaagttagccgggcatggtggtgggcacctgcagtcccagctactcaggaggctgaagcagaagaatcatttgaacctgggaggcggaggctgcaataagcggagattgcaccactgcactccagcctgggtgacagagcaagaccctgtctcaaataaataaataagcacaagacaatactcattcagcctgcagaatatctgtccttgcaggtagaaattccccagggcctgaaagtcacctcaggccacgccaactctgcccaaggacagttcatattcttaggacagtgcttttctggtgctgttagggaccacgtcagttgcaatcaacctcttgaatgcagcattccctggtggaaagcctggcacggggtgtgtttgcttcctagggctcaaagacccacagactgggcaacttgaacaacagaaagtattgcctcatggtttggcggctaggtaggtagctgcaagtccaagaccaagttgtcggaagggtgggttccttctgagagctgtgagaagatctcgcatgcctgtctccttgctcctggtagcctcaggtgttccatggcttgtagatggctttcttcctggtctttaagtggtcttccctgtgtacctgactgtgtcttcatgtccaaacttcccctttgttttctttctttctcttttttttaaagacacggtctcgatctgtcacccaggctggagtacagtggtatgatcaaagctcactgtagcctcaagctcctaggctcaagtgatcctcccacctcagcctcccaagtagctgggactacaggtgcatgccaccttgcctggctacttttatttttatttttttgtagagacaggatgttgctatgttgcccaggctgtcctagaactcctgtgctcaagcaatcttccttcctcagcctccccaaatgctggggttataagcatcagccccagcatctggccaaaatttcccctttctataaggaaagcaatcaaattgacttaggacccaccctaatgagctcatcttaacttgatcatctgcaaagaccctatttccaaacaaggtcaccttcacaggtattaggggttaggacttcaatatcttttggaagacacagttcaacccataatacaaggaaaactctgcccatagtcatttgtttagaagcaaactctccaaggctctggctgggcagggagctgccctgctcagggtgaccgaagtgtgtgactggcatgctgtcaccacccacccaccctccttctctctgattttcccacacacataataaaaaatagtcttagtccatgatcaataacacacatctctatttaaataaattatctcgggataagaaagtattaattgcattgattgtgctccaaaatcagcattcaaaatggggagtggagaccatggaaataaataactgcaaatttcttactaaataggaaatgatcccccgaatctaacctctgtttactccatgtcttaataagagggaacattttgatctttaccgtcttgctgaatacaattagcacctgattcccactttggagttaagactaatttcccatttctacctctgacacctccctcagcctagttgacttgtctgacacattcaccagatactagaaggactgccaaagaggaatttgctacccttatcttttggggacagtaataggtttttcatgaggcttgacatgggtttagaatctttggcaaaaaaaagagaggtgaaaagtcctcaaaacagaattatcgctagttttaattaaatatctttttttttttttttcagacagggtcttgctctgtcacccagtctggagtgcagtggcacaatctcaccttactgcagcctctgcctcccgggttcaagggattctcatgcctcagcctcctgagtagctgggattacagacgtgcatgaccacgcccagctaatttttgtatttttagtagagacagggttttcccatgttggccaggcttgtctcgaactcctgacctcaagtgatccactcgcctcagcctcccaaagtggtgggattacaggtataagccaccacacccagccaaaaaggaatatcttaagatcccccagatattggtacatttgaaggtttaaaaaagtgtgtctgtgatgtttgtgtggaacagcagaaactgcacagaagataaagatcctttcatcctgccccacataaagaatgccatgaccaagacaaaagattcagagctaagcattagcctcagcaatgagaattgagaatccagggggattccacttgcaaaggggccaacgaaggactctgaaatcaaccaaaaggcctgggcagaggttaagagaacggggcttgcgagtcacgcagccctgggtgtgaactccagcgtctgccttccccagttagtgctccctaattactttcaacttcagttttctcatctgcaaaatgggattgatgatagtgctagtggaggaattaaatgaggtgatacatctggagtgctcagtgtggtgcctggcccagagtaaacgttcaaaagtctttggccaccatcaattgcatcatgaaatacgttaatatgttctgtttgtctgtaacggtcgaagtcaactgcagttggcaaatcccaggacactggcctgggtcttgttctctggctgtggggcccaagactcaggccagcggggccttgtctctatgtgaatgttttaatttttttttttttttgagatgaggtctcactctgtcgcccagactggagtgcagtggcatgatcttggctcactgtgacctctacctcctgagttcaagcgatcctcccacctcagcctcccaagtagctgggattacaggtacccaccaccatacctggctaatttttacatttgtatagagacagtgtttcaccatgctgcccagggtggtcttgaactcctgagctcaagggatccacacgcctcggcctcccaaagtgctgggattacaggtgtaagccaacatgcctggccaatttttaaaattaatttattttatatatgcgtgcacccaggagtgcaatggcacaatcatggctcactgcagcctccaactcctgggctcaagcgatcctcctgcctcagcctcccaaagtgttgggattatagacatgagccaccagccactgtgtgaacttttaaatcttctctgtctttcctgcttctctgactttctcatatccctccattctgttatgtaaatgctacattcctacccacatctccattgcatgtgtaatagtcaagtcaaaatgaacaggtctgaggccaagcccctgaaaattctctctctaacctttccctgctcacagcttctccatttcagttaaaggcagctctcttcttctggatgctcagttggaaaagcttggagccactcttaactcttctttacctaacactccacgtccatcaacaaacactgtccacttggccttcaaaatatatccagaatcctggccgggcatggtggctcacgcctgtaatcccagcactttgggaggcccaggtgggtggatcgcttgaggtcaggagttcgagaccagcctgcccaacatggtgaaacccccatctgtactaaaaatacaaaaattagccgggtatggtgacactcacctagagtcccagctactcaggaggctgaggcaggagaataattgctagaatgtgggaggcggaggttgcagtgagctgagatcgcaccatttgcactccagcctgggtgacagagtgaggctccatctcaaaacaaagcaaaccaaaacaaaaatctggaattcgaccacttctccctccactgcactacttccacctggtgcaggctgccagcttctgcccccaggtaaatgcagtggcccctgatcagcctctcagcttctaccctgacctctatgatctgttccccacgcagcagcctaaacgggctggtgatcaagtgggtcaggtcttgaccgccctatggctcagaccctccagtgattccccatcctactcagagtaaaatctgtccacgtccaagtcttagatgtgttttttatgttgttattgttttcagttctctgctgtgttttgtgagaggtggcttggacggaatggcagtggtaaggatggagaggggatgaaacaggaaaaggggaaaaaagcatgcagtcacatctaacacaaattttcattctaatagtttttccaccacttcttagcttagaaagtcttcccttctctagagatctgatgcatagccagttaaaattttcatgtgcttctttcttatagagtgaacttttttttttttttttgcctgatgttatcatccctaagctgcaaagatcttaggaacttttgcttctgttgaaccaaatggctttggagaggacaggagagcaagaatgagtgcaggtcatttccccccctcctttttttccttttttttttaagataggatctcactctgtcacccaggctggagtgtagtggcacaatctcaattcactgcaacctccacctctcaggttcaagcgattctcctgcctcagccttctgagtagctgggactacaggcgtgtgccaccacgcccggctaatttttgtatttttagtagagacaggctttcactgtgttggccaggctggtctcgaacgcctgtcctcaaatgatccacctgcctcagcctcccaaagtgctgggattacaggtgtgagccaccacatccggcctcatttcccctttctgatgccaattcactttcatgtgctcaaataaaccttaatacactatcaactggctttttctttacatttatacagaatcaaaaaactacaattagtgaatgtttattaatcaatagaattatcttcctttagccagagtcaagattaacactctataactatcaatgacttttagaaagataatcaacaatattcaaatttatcagttcattttgaacatcaccagtatctgatcactagaaagactgatcatattttaactactttataagtctcacagaaaaatcctaatttagtgtagtagaccctctcaaatatgtaagaaaaaattcccttccaactctcataagttacaaactcactcactgtaagagagacagctttaggagaaaattgaacatggtgtttacattaagaatggaaataatggcactcatttctgtttaagaaatgtaactaggccaggtgtggtggctcatgcctgtaatcccaacattttggaaggctgaggcaggcgaatcacttgaggtcaggagttcaagaccaccctggccaacatggcaaaatcccgtctctactaaaaatacaaaaattagccaggcatggtggtgtgtacctgtaatccacctacttgggaggctgaggcataagaatcgcttgaaccctggaggcagaggctgcagtgagccaagactacactactgcactccagcctgggcaaagaaggaaggaaggaaggaaagaaggaaggaaggaaggaaggaagaaaagaaggaaggaaggaagacaggaaggagagggggagagagagagagagagagagatcactggaggggtaatgtggtttggctctgtgtccctgcctaaatctcatatcgaattgtaatctccagtgttggaggagggtcctggtgggaggtgattggatcatgagggtagactttccccttgctgatctcatgatagtgagtgagttctcaggagatctgcttgtttaaatgtgtgtagcgctttcccactccactttctctctcctgctcagctgtgaagacgtgcctgcttcccctttgccttctgccatgattgtaagtttcctgaggcctcccaagccatgcttcctgtgcagcctgtggaaatgagtcaatgaaacctcttttattcatcaattacccagtctcaggtagttccttatagcaatgcgagaacagactaacacaagagggggaacacatttttaaacaacagcatgctaagcaacatctcattattcaattgcgatgacatccttgtaaatcagaaagctctttaataagctgaaagataaggtatttcccatgcaaataggaagttaaaaatagatcttcaaacaaggcttctttagtcaccgggacaccaattaatgacacactgcttaatttacacaaaagccaagtttagggaggatggctatatcttccttagcattaggttttttgatactttggaaaaatgggaatttttacatctctttgtatgactggctatggggatggcaaatggtgccctagatgtgagcttgctctgccctctccctgagaggaagggagtaactgagtcagactcaagcccacagggaggcctaagcaggggttctcggtcaggcatgggtttatccagacgggactcatccaaccaagctcaggggtcaaggctaaatcccaaagtcttctcaaggtaaatacaatctttttgacaagtttttgtctttcagtgggcaccaccaaagtaaagacagaagtttaaaacgtcttgtacaacgtggagttttttcctctatcctagatttttctgtcttaaatattgatttatttatttttttgagacctggtctcactgtcacccaagcttcagtgcagtggtgcaatcacagctcactgcagcctcaacttcccgggctccagcaatccttctaagtagctgggaccacaggcctataccaccatacctggctaatttgtgtatttttagtagagacggggtttcactgtgttggtcaggctggtctcgaactcttggcctcaagtgacctgcttgccttagcctcccaaagtgctgggattacaggtttgagccgctgcatccagcagcctctcttaaatattaatattctgttttcaaggaacatgaactttggcagcacaggttcaggacccctcatcagatgcccttgcagctttgccttgtctgttccagacctgccacgcaagctgtcctccctcagtatctgccaaatgcaagtcgcccctcagctagcgctctcagcttggtccttgatggcacaccagcccaggacaactgataacagccagacctgcatccctttggtgggccagcatcactcagaccccacttgggagagttcaggtgaccccctcttgcccacctattcttggccttctccacaacccagtgaaaccagcctgtaatctcacacctgtgaagggcttggcatccttttcaagcctagtgtcgtgtgctctgtgacctccagattatggataaagatgtccaacaagggtgactctactgtagttccaaagaatctaacatgagtaaggttccaggtcattcatctctatcctgaagcttctttcagccatctttgcacacatgccaagacatcatcccccacccacaatggagctagtttttaaaaagcatcctccatatgaagtgttgtcagtgtccccactgttagccctgcagatgcttatgacacttagggacatcactgggtctgatttcttcttttcctccactgctcaatccctcttctttttttttttttcaatgctttttatgcattgggaactattatatagtttattttattattttattttattttattttgagacaaggtcttgctctgacacctaggctggagtgcagtggcacaatctcagctcactgcagcctcaatctcccaggcttaagcaatccttccacctcagcctcctgagttactgggaccacaggcatgcaccacggtgcccaggtaatttttttgtatttgcagagatggagtctcattatgttgcccaggctggtctcaagctcctgagcttaaatgatctgcccgccttggcctcccaaagtgctggaattataggagtgtgccactgcacccagcttcttatatgctttgtttaattaattttttaacttaacaaaaatattaacattattccatatttgttttaggtttatcttttgcttttgttgtgtaagaaataaaacattaccaccagaggtgaagaccccatttctttcctctgtcccaccacttaccccctagaggtaactggaagttggtgtgtgtcctttccattaagatgttgttatatctttaaagcctctgtatgcatcttaaaataagtaatagtattgttttccttagttttaaactttggaccaggcacagtgactcacacctgtaatcccagcactttgggagaccaaggcagacagatgacttgagcttaggagttcgagaccagcctggccaacatggtgaaaccctgtctctacaaaaatacaaaaaattagctgggcatggtagcacgtgcctgtggtcccagctacttgggaggctgaggtgggaggatcacctgacctcaggagggaggttgcagtgagccaaaattgtgcccctgcactccagcctgagtaacagagcaaaaccctgtctcaaaaaaaaaacaacctctacaactttgcattatgtcatactgtacgtgtcaccactcaacatgttctttctccattaatatggcctcaagatttatccatgttgatgcacatagatctagttcaataatttttgctgctttatgttaattcattatataaatatatctcaattgtcttaatccattttcctattgatggacacacaggttgtttctcattttttatcatcactatagtgctgtaataaagactctttagaagtctcctttgtacacattcaagagtatcccaaggatataaaagtaagtttgggatgattggatcaaaaagaatgcatatagtcaactttcagtagatattgccatctgaaacacgattggctgttctgacttacactgtggcttacatggtgacttcctgtttctccaatctgtttcaaacacttgtcagatttttttttttaattttggcaatataatgggcatgaaacatatcactgttttaattttgagttccctaacttctagagagttgggcatcttttcatatgcttattggttactaaaacatcctcttcatatcattgtctgtatctttagtcatttttattgagttgtttgtgtattatgtttgttcatttctcttttttctttttttttgtttatctggatgcaaatatttggtcaattatggatatttttgaaaaatcttttcccaaataggcttacattttaattttaattttaattttgatgactattgttgttaagaagttttatattctattctggcctaatttatcaattatttcctctaaatatgctgtctgactacttctatcttaagaatgtcaagataggatattctattttcttacaaaattttcttattttagcctttaatttatgtggaatatattattgtatatgaagcaggtagcaattcaattttcttttttcaagacaagtcaattttggaaaaacaagaataaaacaagcacttctactttgagtaatgcagaaccagtttccacaattagataatctgaaaaaaagtaaaatctgcttggaaacaccagagaggtccaccatgatagtgaagaattaccaggctaggatctgggaaagaatggagaccccaggtgtagagaatagcatttggggccactttccccaagaaggtatctgccaattctgaggtgggaagtctgagaagccaaaaggttaagctacaatgttgacatccttgagggtgaaagggattggtattcaggccttccaaatagggagatgactagtgagtccccaacaatttgcatagagccacaagtctgtatcctgggagtaaggaaccacagggaggctcttgcaggaactgcaactcagttacaaatcatctcaagctccaacattggattaaagtagtcccagatggctaatgtcctcagctgcttggcagaagcaaaaaataaatctattctccaggaggctaacatgatcccaggcctcaaaactttctatgaacaatattgtacatacaatgtccaaggcacaataaaaaccaaccagtccaccagaaaatatgaattaaaatcaacagaaataacagtcaatagacacatacacacaggggcaccagacattgaagctataagacacatactttaaaacaactatacttgctgtgctcaaggagatgaaagataagattggggaatttcagcactgatctggaaactaaaaacataaagaaataaaacccaactaggtggaaattcaagaagtgaaaaaaatcaatcacccaaattaagatctcagggcatttttttttccagcaggctatacacagatgaaaagataattattaatacactggaagataaagcagaagaaaatattcaaaagtaagatgaagtgataacaggctggaaaattttgaaaagaggattagagatatggaaaatatagaaagaaggtctaacataccagtgattgaagtcccagaagaaaagagagaaaatgatgacagtgactgagaatttatcaaattgttgaaaaacatccacccatcaactctgtgtcacttcaacccgggaggtggaggttgccgtgaaccaagattgcaccactgcactccagcctgggtaacagagcaagattccatctcaaaaaaaaaaaggatacatttaaagcaaattttaacagacatcaaacaacagaaatcaaagatgttttctgattacagtgtaatcaggctattaataagaagaactaataaattcctatatgtttgaaaattaaaaacccatgagttgtagaagaaattacattgtaaattataaaatcttttaattaatgaaaatattacacaccaatgtagtgggatgcacaggaaaccatgtttagaaggaaatttttgtttaaatgcatgtattaaagaaataatatctaaaagtcaatgaactaagcattcacttcaagaagacagaaaaaattaaactaaaaaaagtcaaaggaaataaacaataagaaaaagggtagaaaatacagaaccaacatgcaataaagaaaatcaacaaaggtaaaagttgttatttgaaaagattaacaaaatggaaaatccctaacaagacaataaagagggaaagtgaatgaaaacggcatgtcactatagatcttacattttaaagaggttattaatacaatatgaacaattaaatttctttaattatggaaattcttctagttatccttttaaaaaattgaattctagcttaatcacactgtgtctctaaatgaagtgaatcctttgaaatttatggtcaagtttcaacatattccaagtatgcttgaaaagaatggttattctgtagatgctaggtgcaaggttttatataggccaattaggtcaagtgtatcaatcctatttcatgttgttgttgatatttttgtttactgttctattagatactaagaaagataccataaaatctccccctatgaattaggatttatatatttgtacttgtagttttgtcaatttttgctttatagattttaagtctatattattaggtacatatatattagaattgtcgtgtcttgatgaattaaaacttttgtcactgggaagtggtgctctttggctctgtttccttaaagtctactttatctgatgttaatatacggctgtgcttgctttcttttagtgttgtatggcattttttaaaatccagtgtttgtatggcatttttaatccatcttttggattaatgtaaaaaatataaaaacattttttcataattttttgttaatacataaagcttgtacatatttctcaggcacatgtgatattttgatacatgcatacagtgtgtagtgatcaaatcagggtgattgagctattcatcacttcaaacatttatcatttctttatattgggaacattccaaatctttcttatagctattttgaaacacacaataagctcttgagtatagtcacagtagggtgactatacttaataaccaatagctaatgagcactaaaacttactccttctaactggatttttgtactcattaaccaacccctctacatctcctccttgctacccctccagcctctggtaatcaccattctactctctacctccatgagctcaacttttttagctcccacatatatgagtaagaacatgcaatattcatcattctgtgcctggtttatttcacttaacataatgtcctctggagtcatccatgttgctgcaaatgacaagattttattctcttttgtgactgaataatattccattgtgtatatataccacattttctttatcaatgcattcattgatgggcacttaggttgattccatatcttgactattatgaatagtgctgcaataaacatgtgagtgtcaatatctctttgatatatcgatttcctttcttttggatatatactcagcagtggtattgctggatcatattgccggtagttctgtttttagttttttgaggaacctccatactgttttccatagtggctgtagtaatttacactcccaccagcagtgtatgagggttcacctttttccacatcctcacaagcatctgttttttgttttattttgttttgtttttgttgttgttgttgtctttttgataagagccattttagcttggataagataatatcttattgtggttttaatttacatttccctgtcattctatttttatgttcctttatattttaaacatgtatttaaacatgtatttgtatttaccatatagatagattttaaaatccattctcacagcatttggattttagttggaacacacttcattaacatttagtgtatttattgatacatttgggcttaaatctaaaatggaatatttggctcacgtgttctatattctttcctttcttgccttcatttgaattgacacacacacatacacacacacacttttttctttcttttattagcttaaaaattgtacagtcttaaaactcttttaacgattaccctagagatcaagataatcatccttaatttatcaaggtctatattaatttatattaaattagcacttttacttctttccatataattcaagaaccttggaaaactttaactgtctttatccttctctagacttatatgttattcttgacatgtatgttatttctctttatattttaaaccttaggagacattattatacttgcttaatacaggtaaagtttatttatatttactcttatattaatcgctttttgttgttcttcactacttcctgaatgaccaagcttccatctagggcaattttttcctttagcatgtcctttagtgaaaatctgccagtatttaattctctccattttttgtttatgtaaaaacatcttcaattaatctttattcttgaaggatattctaactgtgtacaaaattccaggttgacagtttttttttctccccagtatttcgaggatatcattctagcccagttcaattttttttcattccatggttgacaagtcaaccattagtctaagtgtcacttctttgaaggtaatctttattttttctacagctgcttttaagattttctctgtctttagtttttaacagattagatagatagatagatagatagatagatagatagatagatagataaattagagggtgtagttttagtcatatttacccttcttgaagtttcagacttcatgaatctgtggcttgatgtctttttgaccaattcttagctattatcttttcatatattatttctatcatattatttctctcctttccttggaatctaattacatatatgttgagctttcttactatatccacattatctcttaccctttcttctgtctttcctattctcttatttttataattcattttggatattttctcctggcttaacttctagcatcttgctattcagatggtctatgacaatattggcatatctgggagcttgtttgaaaggcagcatcctagccccaccaaagcctactgaatctttgataaaggaatattaaagtctcctactgtaattgcagattttgtctatttcttcttgcagttctatcagtttatgcttcatgtattttgaagctttgttattgggtgcataaacacttagaatagttatttcttctatcatatttatcactgataaatgaaaatgataatgataatccctgtttttctaaaatctatttaacctgatattaatataacaaccctaactttcttttgactaaagttagcatagtatatctttttccattcttttactgttaacccatttgtgtctttatatttatagtgtgtttttagtaaacagcatatagtcaggtcttgcttttttagccaatctaggaatctctgccttttaattgaggtatatagaccatttacatttaatgtcataattgatatggttagatttaagtctattatcctgctacttgtttttcacttgttccttctgttctttgttcctctttttctaacttcttttacattaattgaatttttattcctttttttggcttattagacacgacttttattattttcatggttgtttttgagtttataatacatctttaacatattacaatctacatttaaataatattgtaccacttcacatatagtataagagtcctacaatagtatattcccatttctcccatcaaggcctttatgatgttgttgtcatacattttacataagtttacactactctgtaatatttgcttctcttattctgctatgtatttttctgctggctctttctcttgatgctttgactgtgtatgtatttttttgtatgtttttatttattcctttttacccatgtgctcatttttttagaactttatccaggcaaattcttgagattgtagtgaaggtggattcctctagaaagagaatttgtgtttgtttctgtctattgcactggagtactaccagtatggcaatactttatactaaaacttcagattaagatttttttggaccatctagacagtgtgagttttgggtgcaaactagcatgagaatctgtttgttatggcaaattttcaagggagactgaaccctgccccaatcctatactagcaccattcatattttttcataaaattccctgaggatagcaggactggtttatttctagtttgtccttgctttaaggatataatcttgaagtctcagctttatgatggatgtcttccattagacgctctgttttggataggccccaagctttgtgtcctgcattccacagcccaaaaggaaataaaacccaacttcaagttcatcttatctagtaaatgttctcaaggtaaagaagcagcatctatgctcttttctgaattccaatcttcagttgatttttggtttgagtgcttcttactttcttgccagatcattgattcatttaataatttgttaaaaaatttttttcttcatctggcatttctagttgttttccactggggatgttggccagggtccctcatccactgaactgccaataatggaagtctttcatagcaatgtttctgagacgccaaccagatcacttaattttactccttacacatctttagcagctcccaactgctcttgcaatcacacggaaactccttagcttgacatccgaaactttctgatctggcctctgcttgcttctctagcctctctgaaaggtcattatgagatacattgtaccctgcactgcattctcacacctcgttgcctttgtgtgcatactcttttctctactccaactttatggctcagcttaggtaccattcctcaaggaatctacccacaactcagtctgggtttatgtagtcatggtctgttcacagacattaccatgcttacccttactgcactgtaaaccaactaagtgctagatcagtccctacagaaaccacataggctagtccataataggtgttgctctattttgaaggtttgtcccctaaacctcatgtggaaatttgatccccagtgttgaaggtggggtaatggaaggtgtttgggtcatgggggcagattcttcacaaatgacttggtgccatctgcgtggcagtgactgagttctcactgtattagctcccatgggagctggctgtttaaaagagcctaggacctccctccccctctcctgtttgtcccctctctcttgcttctctcaccgtgtggtctctgcacacactgtctccccttcctcttccactacaagtgcaagcagcctgaggcctcaccaggagcagatgctggaaccgtgcttcttctacagcctgcagaactgtgaaccaaagaaacctattttctatctcaattacccagtctctggttttccttttagcaacacaaacagactaagacagatatttaacaaatatttcttgaatgaatgaagaaatgaatgaatgaatgagcaaaccgttattgccatggtgcacatgttactgagagttagagtggacaaagaagagtttataaaggataggggatttgagccagaaaattttataatatttaaacttaaagaagcttcaggtaaccttaactgaatactaatttttaaagaagttcgaagtcttaaaatttctcaccagtcatatgttttgaacctcttctgcaggaaaaccttagtcagttaaattgaagaaggattgtcttcacaggctggcatcttcctaccaaaattctgagcagcacaggatgcccgtttctgacttgcttaagaaaacaacacagtcaggtcaggtcttaccaagcacagcaaaaatgaagcaagaattgttgttggtgaatagggtggaattgggacaagtaggaggaggttttaccctttttcataaataaggtggttgattttgtactggagctgacctgaatataatgcagttggtagtgttgatctttacttacattggctgcagagaactgtccttgctctttctttccccttccaagactgtctaccagctggacttttaccatccaaaacagtccaatctgaaatacaaacccaggacacgtgaaaacaccaactgggacaagaaatcatatgcaaagacattaattttcacttttattgttccagctgttttactgttaattgatacaacctatttattcataaataaatgtattcacagcaaaaatgtggataatcaaacctgatataaccatctgcctaaagatttaaatttcttcaaccttagaaaattcttaaatgcaatgattattcagtggctggaaaggactcttcttaacttatagtactttctgcagtttggtgaagataagatttcttaatttggtaatttggggtagattagagtgttttcataatgtcaagctgaagggtcaaaaataattaaggatacaaagtattattcaattattatgctaatacatgtatctggtgaccactatgaagcaaaaaaaaaaaaaaattccatacatttgatggcatttgcaattttgtatattaaagcttatggttactatattgctacttactaaaaaccaatagcaaataaagcaatatcaatattcaagaaatgagcatgataaaatgatgtgattaaagccaaatggaggccaggcacagtggcttacgcctgtaatcccagcactttgggaggccaaggtgggcggatcacctgaggtcaggagtttgagaccagcctggctagcatggagaaaccctgtctctactgaaaatacaaaaattagctgggcctggtggtgcacatctgtaatcccagctacttggaagactgaggcaggggaattgcttgaacccggaaggcagagattgcagtgagccaacatcgtgccactgtactccagcctgggtgacagagcgagattccgtctcaaaaaaaagaaattcacaagtgagtagaaactcacaaatgagtagaaacttacaaatgtataaaataaatgttagttaaatgctccagttctgtttggttgcataacaaattaccccaaaatttaggagattaaaacagcaaacatttgttatctcctacaggttctgaggttcaagaccctagaagcagcttagctgggcagttccagctcagagtttctcatgaggttgcactcaagctgttgcctggggctgcagtcatcctgaggcttgactggggctggagaatccaattccgagctcactcacatgctgttgttatacctcagtttctcactggctgttggctagaggcttcttctcagcataatactctgcttaggactgcccacaacatggcaactggcttcctttggcctgagccaagagagagcccccaaggtgaaacccacagtgtcttctatgaactaatgttggaggtgatacaacatcactccaccatatgtcattggtcacatggactaatgccagtacagtatgagagaggactacacagggtgtgaatactgggagtaggggtcattaggaaccatcttggaggctatcacatcaaatgaataaacacatcctttaggaaacttgtgtagcctatttatctggtttccctgaggaatttacccccaagatactcctggccccttacccccttctcccaccctttactactcaaggggtacctggatagtgggtcatagcactggtccacatttcttgcctggatggaggtcatctattaaaatttatgagtaaaactaccttcttctctctgagctagttcacgacagaaatcttggttaagtgaatccactttgcagaccaaacttgccttcagatggagagttccaaggtctaaactggctacagagagtcagagaagccactggccaggatgtctggccactcttttcaatatattgttgtgatggagatgatggagatgatatttaatctccattcatctgattctcatttcttcccttggttggttctgaactcagctagggaacaaaggcattctttatcagcaactcagaccccaactagaaggaatgccttgacagaatgagaaaacatcatccaatggcactggggcattttatataatttcagctgactagatccaatcatcagcttaggaatttcattcattgattgtcctcactgacatggaagaaatttttaatatattaattaggctattttttttttcctggaggttcaaactcttaaaattgtcctttatttttgtagtggtgctttctccctatgggatgcaaaattggaaatgaagccatggcattgtaatgcatgcagagttttagttattggcactccaattgccacggaataatcaagagatgcaaaaggattgttactttctaatgttcagtcacttctgcttctgtttttgcataacactggactccagctgaacctacctttgtgatctgattcatgggttcctgtaagatattaatgtaattcctcaattttaagatacatttcctcccacctcttaatgtttctgggatcaagatgtcaaaagaaacttgccagtgctttctttcgctattaaaggtaggatgcattctaaaactagtgatgttttggaatcaaagaaatgtaaatgtaaggcacctgggctgatggcaatcttgcagcttgaactgcctaagtgagagttgttcaacaataacatttggtatgttttatctgacggtttttgatatgtaacgtggctgtgtctcctggcaatcttgattggtttttatttctaggagggttgacggtttcttgggagatttggagaatactaaatcaagaacttgtctagctggataggccattctcacagacatgggtgggaaattcactggaggacacctgatacccttggttcctaggctgtccttaattcctgcaggggctatctaaagagtgagcctttcatgttgtgtctctgagccctcaaacttgaccttactgtacttcctgctaagtgacatggaaccaggacccccagagaactgttagagggaagaagttgcttaggatatctaaagcctagaaacacagcctggaggagggcctttggttggaagagtggaatatgctgtaatatgtctaagaaagcagcagtgagtgatactacctgtgaaagaggatggaagatgacaagttgcagcccttaggaattaagaatagtatgtatgtcagaggcatttgaaccagagcaactccatcttgaataggagctgggtaaaatgaggctgagacctactggactgcattcccagacgattaggcattctaaggcacaggatgaggtggaaggtcggcacaagatacaggtcataaagaccttgctgataaaacagtttgcagtaaagaagctggccaaaaccccaagatggctgcaagagtgacctctggtcatcttcactgctacactcccactagcaccacgacagtttacaaatgccatggcaacatcaggaagttaccctatatggtctaaaacggggaggcacgaataattcactccttatttagcatatcttcaagaaataatggtaaaaatgggcaacagcagccctcaaggctgctgtatctatggagtagccattcttttattcctttactttcttaataaacttgctttcactttattctatgggctcgccctgaattcttttttgtgcgagatccaagaaccctctcttggggtctggattgggacccctttcttgtaacacatatatgtttgtgtataaaatagggaatgaggtcagcaagcagctgacattcccaactacaccaagcatcactacaccaatgcaagaaaaagaaagagtcagaaaagaaaaaaggtgggggagaagattggattcaccctggaagagcagtattcatggcttaatgttgctggctaggaaatatgctcccctcactggaaagtatttatattcaaaagaatttctgcattggatttatctagaagcccaggcagaggtgaaggtgaatataaattagagacaaagagtctgctataagccataacatgacccaaggcagagcaaaggattcactagcaataagacagcaccacccagctcaggaaagggcacagctccaggccaaatagtctcatggcaatttacagaagctttaatttggatgtgcaatgtaagggcagttattctgagcaattctattgttgcgtgtgtaaaatgatcccttatgtggcctgtgtagatttatgttattcctgcataatcagatagcataaagaaaatgcccattccatcttttggggtgttacccacacccaatataaaggtgattccctaccagccatgtttgtaccacatgaccaggctctctggccatagctggctagatcaggagcagacaagtgtctggctgagccagtctgacactgagaatgaggatctgtgatatagaagaaaacaactaatgtgcttttttttttcttattctcatactcaacaatcaacacaggatatttttgtggctgggtacaggggtgtacttccccacacaccaagcagccaattttgcagtttctccaggagacatcagctggttgtcctctaattcaattcaattccatcccgactctatctacctagagatagcatcagatcctacagggtgaggactcagtcccacatgacagtcacagccaggcagatactagtcgcaagcacaggctgtgacctgttcttctcaccaacgagctgtaagtcagagctcccacaactctcttatggggtttgattaatgtgctagagtggcccaacaaactcagagaaacaccttccttactttaaccagttgattaataaaggacacaggtgaacagccagatggataatgcctttccataaggcaaggtatggaaggacagacatggggcttctatgtcctctccagatgtaccaccctccaggagcctccaggtgttccaccatctgcaagcccatctgaaccctgtccttttagggttgtatggaggctttattacataggcatgattgatcacattgttggccattggtgattaactcaacaaccttcaccccctctcccatccccagaggcagggggaggggctgaaagtcacaactttctaatcgtgccttggcctacccagcgaccagccgccatcctgaagttgcctagtggcccccggccacctatcttcacattagcatacagaagatactcttatcatgctggagattccatgagtcttaggaaccctctgtcaggaaacgggaagaagaccaatatatatagattgtataattcccagtatcccacagaggaaccacttctacctggattgtctccttaaatgacaagacatgagaccaggtgtggtggctcatgcctgtaatcccagcactttgggaggccgaggtgggaggatcacttgaggccaggactttgagaccagcctggacatcatagcagaccccatcgctacaaaaaaatttttttttaattagcagggcatggtggcgcacacctgtggtcccagctactctggaggctgagatgggaagattacttaagcccaggaggtgaaggctgcaccgagccatgatcgcaccactgcactccagcctgggtgacagatcgagaccctgtctcaaaaaaacaacaaaaaaggcaagacataaacctggaacttggggtgtgtctatcacagcctctgcggcaggaagagaggaatgagcacactccccaggggaagtagaggctagggacctagagagagggaaagaacataggtatgaagggtcctggtggatcctggctccagtcctttctgaagctgcatggccatctctggactctcttagatgacctcacaactgtacaatggatgtagttcccccatttacttatgctagctttaactagtctatgttacttgccaccaagagactaagattcttaactaagacaggccacaggacttactataacttaatatacctcacattctccttgcctaacttcgatccacatgttccttcctcccttccccttagacctctcctagtccagagtgggtcagcaggatgaaagaacgggagaggcagtgttaatatagaaatggatcttgtaggccaggcggtggctcatgcctgtaatcccagcactttaggaggctgaggcacgcggctcacctgaggccaggagttcaagaccagcctggccaacatgatgaaaccctgtctttactaaaaatacaaaaattagccagatgtggtggtgtgcacctgtaatcccagctatttgggaggctgaggcatgagaattgcttgaacttaggaggcagaggttgcagtaagccaagatcacgccattgcactacagcctgggtgacagagtgagaccttgtctcaaaaaaaaaaaaaatggatcttgtagtaaaaaagaaagataactttcaatataagagaaaactattatgaccttaattcctgctagctatatttcagcttcagagcagtgacttatacatggtggtactactcaatatttattcaactgaatttaatgtgactgaatttaatgtctcaaactaatgtccaaagctgagcatcatatttcataggatagcattagaggcattctcagtgaataaggaaagagaaaagaatagtcattattcctgttatttaatgttgtcccagaaataccatttagtatactaagcaaggaaaagatttgaaataaaatgctttgtaaagtttcagaaggatggagtagatgtacttttccttacttcttcagctaagtacaacttaaaacccttgacattatatataaaatgaacagaagaaaaccccgaaaggtggagagagaaaaaatagactctctagggacctcaggacccaaggaacaatatagtaatgtgttctttggattttgttttaccttaaatatcctagacatgtagctaaagaactcacaatccagaaacaccaaaatgcacagacaaaaaacaaaaatgttccaacaagacatctgctttttctagccaaaggaccaggaaagagacaggctagcaagacagaaaacttttagacaaaagccgctttactccagccacataccacagaaaaagcctcaccctgccagaccagcaaagggtgaagaagagcctagacctccaccaccaccaggctgtaatggggtgccccaaaccacctgccagggcgatgtcaaagaagaacgagtagggagctgatattttcatccccatctggcagtaatgaggcacttcttactctccccactggagtggtatcagacaagacctaaagaagagtcaagactttcacgactgcccagcagtaatgaggccacctcaacctttcccccatggtgtcagaagaggtcacatggagagcagtaatgagacacctttatcccttcccagctcatgggaaacttgaactctcatccccaaccaacagtaatgaggagtctctctatccttggatgtcaacagaggtcacatagaaacctgcactttgaccaacttttggtagtaatgaggcagcatcccctttctcctgctggagtgttgtcaaaagggactgtctaaaatagaaggtttaaataagacccagattctcataacatagtacccaaaatgtgcaggtctcaatcaaaaatcactcttatcaagaaccaggaaaatctcaacttaatggtaaaaagacaatacgtagatgccagcactgagaggacggatgttaaaattatttgacaaaccttttaaagcagccatcataaaatgtttcaacaggcaattatgaacaagtttgaaataaatgagaaaatagaaaatctcaacaaataaatagaagatataaagaagcagcaaatggaaattttagaactgaaaaatacaataattgaaatttaaaaaattcaatggatggtctcaacatgaaggggacagaggaagagggatacaggaaggaatcagtaaacttgaagttagaacaacacaaattacccactctaaacaatggagagaaaacagaccaaaagaagaaaaaaagaaaaaagaccagagacttagggacttttgggaccctaacaaagatataacattcatgtcatcagactctcgaaaggaggggagaaagagggtgagactaaaaagtattcaaataaataatggccaaaaattccaaatttggcaaatgctatatgcctataaattcaagaagctgagcgaacaccaaacagaataaactcaaagaaatccacaccaagatacataatagtcaaacttctgaaagcaaaatgcaaagaatgtatcttcaaagcagtgagaaaggacaacttacctataggggaagaacaatttgaatgactgcagatttctcctcagaaacaatggaggtcaaaagaaaataacatgacaaatttcaagtgctgaaagacaaggactgtcaactcagaattctatatctagtgaaaatatcctttaggaatgaaggggaaatctggacattttcagatgaggaaaagctcagaggatgttttgctagcaggctaatataaaagagtggctaaagaaaactctccaagtagaaatgatatgataaaataatgagtcttggaatatcaagaaggaataaagaaaaaaggaaagagtgaaaatttggatcaatacagtacatttccctcacctcttgagttttctaaattctgtttgatggtcaaataagaaattacaacattttctaatgttataattgagatgagagttccagttccccactagttttaaatgtgtgtacaggaatatttaagacaattacaaataggggagggcaaaggggcataaaaggaggtaaggtttctatgcttcacttgaactgttaaaatgtcaacaccagtagttctgtctatataatgtctatataataagttatatctatataatgtaatacctcaagcaaccactaagaaagctacacaaagagacatcctgaaaaaaaactatagatgaatcaaaatgaaattcaaaaaaaatccacaggaatacagggggaaaaaaagagagaaagaaaaaacagaaggaacaaacagaaattaaaatagcagacttaagttctaatatgtcaataattacaattaatgtaagtggcctaaacatgccaatgaaaagaaagagatcagcagaatgggttgaaaaatatggcccaactatatgctgtctactagaaactgacttcaagtataatttaggtaggttgaaagtaaaaggacctaaaaaggtatataacatgcaaacattacttaaaagaaaaaaggaatgggtataatcatatcagaaaaagtagacttcagagcaaagaaaataaccagagacagagaggtacattacctctctgttgataaaagggtcaattcaccaaaaggacatagcaatcatgattgtgtatgcaccacacaaaagagctgcaaaatatgtgaagcaagaatttatagaactgaaaggagagatacaaaaattcccaattatagttggagacttcagcacttccctctcaacaattgatagaaaaacgagacagaaaatcagcaaggatatgggagaactgaaaaatacaaccaaccaacagaacccagccaacatttacagaacacccaacaacagcaggatgcacattctcttcaagtatccgtggaacatattccaagatagaccatatcttggaccacagaacaaacttgaacaaatttaaaagaactgaaatcttacagagtatagtttctgaccacgatgggatcaaactagaaattaacagcagaaagataataggaaaatcttcaaacatttggaaactaaacaacaaacttctaaatgatcagtgggtcaaagaagaagtctcaagagcaatcagaatccactaaaaaaactgttagaactgataacaaaggccaggtgtggtggctcatgcatgtaatcctagcactgtaggagatcaaggcaggcagatcacttgaggtcaggagttcaagaccagcctggccaatatggtgaaaccctgtctctactaaaaatacaaaaattagccaggcatggtgggggggcgcctgtaatcccagctactcaggaggctgaggcagcagaattgcttgaacctgggaggcagaggttgcagtgagccaaggtcgtgccactgtactccagcctgggcaacagagcgagacttcatttcaaaaaaaaaaaaaaagaaagaactgataacaaaattttgcaaggtaatcagttacaaaataaatacataaaaagtgatggttcacgcctgtaatcccagcactttgggaggccaaggtgggtggatcacttgaggtcagaagtttgagaccagcctggctaacatggtgaaacctcgtctctactaaaaatacaaaaaaattagccaggtgtggtggtgcacacctgtaatctcagctactcaggaggctgaggcaggagaatcgctggaacatgggagaatcactggaacccgggaggcagaggttgcagcgagcagagatggcaccactacactgcagcctgggagacagagcgagactcagtctcaaaaaaaaaaaaaaacatgaaggcaagataatcctagtcacaacttctgtatagctatagtaaccaagtttgtatagtattttctatattcttgaataagtagatgtaatatgggaagaaatccattaatcctcagataaatctgtaaatataaagcaattccaattaaatccttatggaattcgcctggaaaagaaacacctgactcaggcgtgaacattatgcaaaatggggtgagagtcaccataacagatatagacatgacttataaagtttcaataattaaagtattttacagagagaggccagtgtaacagattagaaaacctagaatcaggtccaagtgtatgtacgaatttagtataagtacataaatgttttatatattttgactggttttctaattattcatggcagaagggtaaatcgggcctctttatctcccttaggccagaaacagacatccctggctgctttcagagagtagactgcagagggtctaggacataaaggggagacccactctggggtctgtggggatccaggtgagagttgaccatagtttggaacaggagagtaacagatctctacaaaatgtgctttgattccaaatgagtttggaagacaaaaaagacagcttgctgatgaattacatagatatgggggtgagagagaaaccatgggttccaggatgacacagctactggaagaatagaggcgtccagtcctgagatgggcaagtcttagggtgattcaggccagcacctattagacatccaaacgaagatgtggggtatgcagaaaacacagaacatgcagatgagcaggcacatctgtttttccaactttccatcatgcattattctacttttatatgattttattacctgaaaaagttactgaaaaagccattgtctatatttcattgaattcagaacttcaggattatcctcatttctcaagttagcagatttgccctttaacagttcaaaagagattgagagtggctcatgcctgtaataccagcactttgggaagctgaggcgggtagattgcccgagctcaggagttcaagtccagcctggggaacatggcgaaactccacctctatgaaaaatacaaaagattagccgggcatggtggcaggcacctgtaatcccagctactcgggaggctgaggtgagaagatcacttgaacccaaaaggtggaggttgcagtgagccgagatcatgccactgcactccagcctgggtgacaaagccagactccgtctccagagagagagagaaaaatgcatgtgaatgtatgtgaggaggcagactcagaatttagagtcctggagaaaccctccccaggaggaagtggggaccacacagcacagctgacaggcccacactcccactgaggaagacccccaccctcccaagttttcctttttctccttttttaagtgcagaacccaaagagggagaaagactttccctcactctgctcacaaagacaaaatggcagcttaaacatgggagagacctggttagaccaaacattccagacaaggaagtgggttgaatgtcataaacatttattgagcccttgctacttgccaggtataggcaagtacaagctacaaataggaatataacaaggaatttgtaatgcggtagggagaaaaattaaaatcatgagcaagaaggggaaaggatttgcaactttatcaaatgtgtagcttttaactatcgccactatcgagaaccaaaactttttcattaacaagtttatctcatgccacccctttagagccacatcctaacccttgataaccactaagctgttctgttatttcaagaatgttacaagaatagaatgataccgtatgtaaccttctgagattggatctttacatttaccatagttcccttgacatccacccaagttccaagttgttgcattaacaatggtttcttttttaaaaaatttcaacctttattttggatacagggtacatgtgcaagtttgtcacttggctatattgtgtgatgctgaggtttagggtacagatcccatcactcaagtagtaaatatagtacccaataggtagtttttcatccgatgctctagtggtccccagtgtctatcattcccatgtttacgtccatgtatgctcaatgttcagctcccacttacaagtgagtgcatatggtatttggttttctgttctgcattaattcacttaggataatggcctccaggtgcatccatgttgctgcaaaggacataattttgtcctttttccgggctgcatgggattccatggtgtatggatgccatattttctttatccaatccaccattgatgggcatctgcattgattcatgtctttgctattgtgaatagcacagggatgaacatacgagcacatgtctctttggcagaatgcctgtgtcttttaattgctgagtctctcactctgctttatgcccctcaaatgaattctttccttcaaggaggcaagaatcaagttgctacagacctgtatggatttgctgctgctcacagtatgagtatgcctggataattcaggtctaactcagggctaactacagcatctcatattgggaaccttgctctctaaaggcctctaagctcacaaatattgtgaaattgtagggaaactccaagatcccctaaataacggtgaagcagagtggcaatagaggattaggacctaaaagtttcacatgagctgcaaaagacacaaacagtctacatgaaaaaaaaccatgtgctttaagaactacctaagattcctgggcccaatatagtggaccaggcagttatgatttatgttctctttgccttagccagagacccaacaggaaatagaaagatactcaaattgaatcgctcaaggagagtttaataaagggattacttacaaacatgtgggcagggtatggagaaacacaaagcatgggcagtaccccggggccagaaaaagcaggggtcctttgccgtgactggcttggaaaggtgaggctcctgccatctcaagccagaaggctgtgtcaagaggccaccatgaaaaagctgtggcccttagtaagggactcagccagcctgagacaacctcacagggaggttgttgaaggcataaatgccctggcctcactttttcctctttctgaccttctgctgggactccccattggctgaatccaaccagaaggcaaagggaaggaagctggttaatgtgtctatatggtcagcctcttcaaacaaagataacggtgggaaaggatgaagatgagatgggaggactggcaaatggaagacacctggcatacccttcctcctgacacccaggggaagtgatggtaaaagaacagaaaagattcactctcacactatgagaacaggagagggatcactggtgggtcactgagtttccccaaagatttagttgaaaggtatagacagatgtgaattagctggagagggaaggcagagaaagccacagcttgaacacaggtcgggggggtctgtgtctgagagtaggaaactgcccatgagaagttctagtttcagaagtgtcaagcttgacaaccaaaaagtgagcagtggggctggcaataggggaaataattaaagggtctgtattctgaataatcaaccctgccgtatgcctcctcaattccaaatgctaaaaaggccagcagccaggtaataattctgcccttggcagatgggcataacatcaatcttcaaggtaacaggagctctcaacaaaggggggcaagctgaatgtagaaggcccaacctgaattcaccattgtaaaatttcagaataccaagaaaagacttctgaaagaagaagtcagctatgcaaaataaaagaatcagagtcaggttacttttcctgtgagcaatactagatgctagaggacaatgcggtgtgactttcagatttctgaaggaatttattttatacccagaattctatacccagccaaattatccaccaagttcaaggtaaaaataaaggtagttttcagacatgccaatactcggaaagtttctctcccacatacctcttctggggaagttacttaaggatttagtcttgcctcagaaaggtctagctgacatggaagaagacaaggaacttggagagcaggaaggaatccaaatgtcagttgtatggcagccagaggagccaccatccctgcctggagcatcaaaacaacaggcttcagatgggagatgtccaagggaaaaagtgagtgaattccatgggagcctatgactaggctttgtaacggtcgagaatgtgaaaaatgcatagaatgcaaggcaagaaaaaaaaaaagacagctagagtctctaggaaaacctaacagatgcgtaataaagtcataacaaaatattatgaaatcaggacagatttgagcagaagtcagtggagttagaatacaataaattatatggaatttattggtaataggaaaaaaacctggaagttattagtgatacaatgaaaaaaacacgtttcttccctcatcaagagcaaagaagggtgaccagcaaaggggatgggggaaattatacaagaaaggtgtcatctaaacataatgtagaaaatatgtcatgaatgtgagcaattaatcaggtgtaagaacaaattcttttggacattcttctgtgagtagcacagaagtgggaatattaagatagctgggaagaatgtagtcatcgattcttcttggctctggagcaaacaatactgtttataacatacatgtacttcagtggcccacctgtgatccctctcctgttatcgaagtgtgagagtgaatcttttctattcttttaccatcatttccctgggatgtcaggaggaagggtatgccacatatcttccatttgctgctcctcccatcttctcttcatcccttcccaccattatccttgttccaggaggctgaccgtatagacagacatattaaccagcttccttgctgtgtgccttctggttggattcagccaatggggagccccggcagatgattagagagagaaaagagtgaggccagggcatttacttgctgcctgggactctccccagatattctcatggcttattcccttacctccttcagggttttcctcaaatatcaccttttagagagagcttttctgactattctatctaaattgtgacacacacacatattccctatacaccttatagcttaatgtttttctaagcacagccagcatactacatattttgcttcttcatcttgttttttatctcccacattagaaagtaggttccatgaggacagagattttctactcttatgtttattgtggtttctccaccaccaggggcagggacttgctcagggtaggaactgaataaatatttgttgaattaataaatgttgaataaagttgtaggcaagtcacttaaggaatatttgggtttgtgtgacagaaagtaaacgtcattacacttggcaatgtaaaggtaaaagcataggccaggcaaggtggctcacacatgtaatcccagcactttggagtccaaggtgggcggatcacctgagggcaggagttcaagaccagcctgggcaacatggtgaaaccccgtctctactaaaagtacaaaaattagccaggcatggaggtgcacacccatagttccagctactcgggaggctgaggcacaagaatcacttgaactcaggaagcagaggttgcagtgagccaagatcatgccactgcactcaagcctgggcaacagagtgagattctgtctcaaaaaaataagataaaataaaataaaataaaggcacagctcacagaagttgggggctgggaaggcaaaaaaatgcagaaggaagaagaaggttaggagtgctaatattctcaatttattatgtggacaatcaagatactattgataaaataaaaagtaaaggtttaataaggttacttaaccttattaataaccttataaaggtagcaattaaaatattcaaacataataatgtaatcatattggtatgagtgagccagagaaggtgaaagacatagattgagttaaatttcatccaaatttcaattcaacatagcaaaaagctactatagtttttaagttgagacatccagaagtataagcataagagtagtatttagagtatggcaatgaacttaacaaccttatactagaaatagttaaacacagtggctgtgatatggtggtttcaataatgaaagactacattttatcaaactaatacttctatagataataattatagactctggacaaaatgtaaagaaactatctgaaggcattagaaagtgacccaaagcacacatacaaatggcaactgcaataggtaagatcaatgtccttaaattttccctgaaggcactctctagtctgcaagaggtagagaagctaaaaatgaaacagaaagcctgaacagcaagagaggctgaaaattgagggggagaaaacccaggggaaaaaaaaagaatccaaataaagagtccttaaatttgcatataaactcctctcaaatccttagctgaactgtgcacattcagggaaactctaggaagccttctgaaaggcaacagctgggagactgaaaagcttgagcagagatttcaactgtcacccactacaggagagacagtttggatttggaatcctaccaagttagagggacttagcaaacactcaggctttccatcaaaaccacagaagggctgtgatttagaaggtagaatatgccccaagactgaggggttaccctgagactaagaggaaaactgaaacacacttacctaacgaagtctgaaatgaagaatcctcaagttcatggtgacaggccactaattagactgcttgatagaacaaaaagaaacaaacttcagagacgtataaaagaatctagagtttctacagtgtgtcatgcaaaatatccagtatacaattaaaaaaaaaagacatacaaaaacaggaaaatgtggtcaatagtcagaaaaaccttactcaataaaagtagataatcttgttaaaattggtagacaaagatgttaaagcgaagatgttaaatattcaaagaattaaaggaaatttcagcagagaaatgcaaactacagaaattttagaactgaaaagtaaagtatctgaaataaaaaatgtactggataattttaacaataaattagatactgcagaagtgagagtaagtatagtttaagatggatcaacagaaattacccagtatgaaaaacagaaataaaaagttgaaagaagaaaaaacactaaagtctcaatgaattctgagagaatatcaagtggtctgacaacatgtgcaattcaagtccaagaaggaaagggcaaggagcaaagaaaatttgaaaaaataatgccccaaatctctcaaatttggtaaaacaaaaaacaaacacacaagcaaagcttatacattcaagaagctcagtatgtaccaaaaagagcagatacaaagaaaatcacacttagtcacatcataaccaaaccacccaagctaaatataaaaagaaaatgttgaaagcagccagagagggaaaaaagacacattacacacagggtacaaagataagaataatcactggtgcctcataagaaataatgaagtccaattgacaatggaatgacatctccaaagtgttgaagaaaaatgtcaacactgagttctatattcagtgcaacagagatggaataaagtcatctgaaaatatctttattccatccccaaaatgagattgagtaaagatattttcagataaacacaagctaaaagaatttgtcaccactagacttgtactacaagaaatgctaaaggaagttcttcaggctaaaggaaaatgataccagatgggaacttgaatctacaggaataaagagcgctaaaaatggtaaacaactaggtaaacatacccaggcttttttcctcccataacttgcttttaaaaatgattatttaaagccaaataatagcactataaggtggggcttacatagtacgtggaaataaaggacatgacaagagcataaaagatggcataagagactagataaataaaatgaatctattgtaatgttactgtatttgtgaagtgtgagatatgaactctaaagtgggaacggtaaggtatgaaatgagaggtggtagctgtgaaattttcagtgagaaatgatacaatataaatctaaataggctttgacaagaatgcacgttgctagttttagagtaactattaaaaaataaaaacagctttaaaaactgtagctaaaaaaacagtaaaggaaataaaattcaattcagaaaacattcaattaatctaaaagaaggaagactaaaatgatcaaagacagaggaagaaaacaaaacaaataacaagatgctagacttacactcaactaccccagtaattgcattaaatgtaaatgatatatttatttcaattaaaaggcaaagaatgtcagattgtatacaaaagcagtatccaattaaagctacctatataagatgaactttaaatataaaaataaagtgtggttaaaagtgtggaaaaatacattccatgtacacagtaaacattaaaaggctgccatgcctattttaacatcaaaaaagtagacttcaagacaataagcattactagagacaaagtggcatatttcataatgataaaagagtaattcattaagatagtataattgtactaatcgtgtgtgtacctaataacagaacttcaaaacagatgaagtaaaacctatcagaagtaaaggggaaatcaatgtatcgaagagatatttgcactcccatggttgttgcagcactgttcacaatagccaagatttggaatattttaagtgttcatcaacagaagaatagataaagaaaatgtggatatatacgatggagtactattcagtcataaaaaagagtgagatcctgtcatttgcaacgacatgaatgatactagagatcattatgttaagtgaaataagccaggcacagaaatgttatattgggtagctagtctggtattagcagggaaggaggggcctccccacaaaacacacacacaccagcagtgtcaagcaactatcgggtgatggtcaggtggttgttaactggtctctctaaagtaataattggtcacagacagtgccagggacaggcagtctcctaatagattaaaaaaaaaaaacacctgaaagatgatcagcagcttcccgataagatctcaggagttgggcgagtggggagaagtaacataagactctagaggaatgccaatgtataaagtcaaaaggttgagctgcacacttgcctttcaagttgcccactggccttcttccaagtagccaagtacttctcttcctttcattcctgtttgaaagcttttaataaactttcactcctgctccaaaatttgccttggtctctccttctgccttatgctcctcaaattctttcttctgaggaggcaagaactgaggttgctgcagaacctcacggatatggattcaccaccggtaacatattttggtgctgtgtgattcagataccttccaccagtaacataaagacaaacatcacatattttcatttatttgtgggagctaaaaatcaaaacaattgaactcatggacacaatgtaaaaggttggttaccagaggctgggaacgtagtggggcagagtgggaaggaagtggggatggttagtaggtataaaaaaagaaatagaaagaaggaataagacctatgatttgttagcacaacaggatgactatagtcaataataacttgtttgtacattttaaaataaccaaaagagtgtaactggattgtttgtaacacaaaaaataaatgctgagaagatggatacctcattgtatgagtccatttttacacagctgataaagacatacccaagactgggtaatttgtaaagaaaaagagatttgatggactaagagttccatgtggctggggaggcctcacagtcatggtggaaggtgaaaggcacatcttacatggctgcaggcaagagagaatgagagccaagcaaaaggggtttccccttatgaaaccatcagatctcgtgagacttattcactacccctccccatgaggaaaccgcccccatgattcaattatctcccaccgggtgcctcccacaacacatgggaattatgggagctacaattcaagatgagatttgggtggggacacagccaaaccatatcactcattctccgtgatatgattattacgtagtgcttgcctgtatcaaaacatctcatgtaccccataaatatacacacctaccataaacccacaaaaattgaaaactaaaaaaaatcttgagaaaagaagtaaagggtcaagtcaacagcctctcacaatcacagttggctatattaacacccttctctcagtaactgatagaacacataaactgaaaatctaaagaacactatcaaataattttatctaattaacatttactgaccaccattcttaccaaattcagaatgtacactgttttcaaattcatgtgcaacattcaccaagataggaccatatgctgggccttaaaataagtctcaatgaatgtcaaaagagaggatggtcttaccacacaatatacaattacgtcttacaattacgtcaataattgtaagatatctaggaaatctccaaatgtttaaacagggtacttccaaacaaactacagctcaaagaataaacacaatggaaattataaagtatttaaaagtgagtgataattcaaacaacacacaaagttagaaaacatagttaaagctgtgcttagagagcaatttacaatgtaaatgtctatgttaggaaagaacgaattaaaatcaacatttaaagttaatattttaagaagccagttaaagaaaaacaaatacaaaacagacaaaaagaaaaaaataacaaatccaaaatgtagttccctgaagtgattaataaattgataaaaataagtaggactaatcaagaaaaaaagagagaagacacaaattaccaacatcagaaatgaaagagaaaggtcaggtatggtggcacatgcctgtaatcccagcacttccggaggctgaggtaggaggattgcttgagcccaggagtttaagaccagcctgggcaatatagtgagacatcatttcttattaaaaaaaaaaaaaaagttaaattagcttgtcatggtggcccatgcctgtagtcccagctacttcggaggctgagatgggaagatggctccagcccaattaagtaaaaggacaattaagtagtggttaaatttcttgaaaaacacaatttaccaaaggacatttaagaagaaatggaaaatctgaattgacttctatctataaaggaaattgagctcataatcaaaaatcttcccacaaaacaactccaggcccatgttatttcactggtaaattttatcaataactttaaaggaaaaaataataccaattttatagaaaccttttcagaaaatggagaaggaaagaatgctttcaaactcactttatgaggccagcataacttttatatatttgtagccctggtaagtataagttcatttttcaataaagatgcaaatgttattcaatgaagtaaagaataatcttttcaataaatgataagaaacaactggatttctatatctacatgtctttttatatataaatatggttatggattttttttttttttaagacagactcttgctctgtggctcaggctagagtacagtggctcaatttcggctcactgcaacctccacctcccgggttcaagcaattctccctgcctcagcttccggagtagctgggactacaggcgcccgccacgcctggctaacttttgtatttttcagtagagatggggtttcaccatgttggccaggctggtctccaacacctgatctcaggtgatccaccaacctcagcctcccaaagtgctgggattacaggcatgagccactgcacccagccggttatggatttttaaagagaacctcacttagttcctcacacatatgcaaaaattaatttgaaatgtatcatagacctaaacttataagataaatcacataacatataaaaatttttcataatcttgaagtaggcaaagatttcttagaacacaaaaaacactaactgtaagagaaaaaaaattggaagttgaacttcatcaaaattttaaacctcggctaagcaaaagattgccaacaagacaaagatgcctacttttataacttctcttcaatgttgtactggaggttctggccagggaagttaggcaagcaaaagaaacacaagacacccagactcgaaagtctgaaatagaactatctttattttcagacaacataatctcatatacagaaaatcctttaaaaaatctatttttaaaaaatgactaataaatgaattcagcaaggcggcaggataaatcaacatagagaaatcaattgtatgtctatacgttaacaatggcaatctaaaatgaaattaagaaagcagttccattcacaatatggaatcaaaaagaataaaatatttagggacaaatttaacaaaagaagtgcaaagcttacactctgaaaactacaaaactttgttgaaagaaattaagaagatctaaataaatggagagagacattacattttcaaaggctggaagacttggtattattaggatgacaattctccacaaattgatctaagactcaatgcaatccttattaaaacctcagttggatatttttgtagaaattgacaaactgatctaaagttcatatagaaatgcaaaatccacagaatagcaaaaacaatctggaaatgaaaaacaaagttggaggacttattcaccctgatttcaaagcttaatacaaaactcctatactcaagacagtgtggtgctgacataaggagagacatttagatcaatggaagagaattcagagtccagaaataaccctttacagtcattatcaattgcttttcaacaagggtacccaaacaatccaatgggggaaagaataatcttttcaacgaatgttgctgggacaattgtacagccacatgtaaaagtatgtgtggacccttccctcacaccatacacaaaattaaacttgaaatggatcatggactataatgtaagagctaaaactgtgaaactcttagaagaaagcatgagtaaatcagtgatcttaggtttcttgaagaatgatatcaaaaacacgagataaaataaaaaattgatcaattggactttattactccctctagtggatccaaaatataaccatatttataactatttcatcttttaaaaacaatagtaaaagatatttccataacaattcttctactcagtggtcattttcatggtcattatggtgaattacttttgctttcctgtatagcatggccaaggggcgtgaaggtattttcaggggtgatagaaatgatgtgtgtcttgaacgtggcggtagttacaccactgcaccaatttttatcaaaaccacttggcttgaagacttaaagtctgtgtacgtatttcaccatatgtaaattttacctcaataaaaatttcattttacaaagtgatcgctctgaggagcagaagacgagcttttcactgcaagcctttcagtacttcttaaaatttttaaaagcgtgtgtataaattactttaagctctttaagttttgaaaaataaaacatgttccaatttgaagcttcttattatccttgcttcatagaaaacagaagatgagaagaactctcttgtttgagagggtatcatttagcatcaataacaaggttttcctctcttccttccctggcgttcccccagagtcacagcaccagtccagggagaccacggggaggtccgggagcaggttctgagtcagaagaaggcttgcttttaaaagctgtgatggaaacgaagttgtaatcatttattccctgtcgtggagctactgtaccaaacacagaatctctaggaaatgaaagtcagaatctcaaaagcttcagtttttgaatgctaaagcttatttgcatatcaatattgcctcaggacaatacgcagaattagaaaattaaggaactacattagaagagagagaaagaaataggacaaatgcgtggaagtatagagctcccctctgtcatctagtaaaagtcataaataaaaagccacactcaactccatggctggtgaattttgataatactgttaccaaaattttatttacaaactcagtaacaaacaaatttttttcattaaaaaatacacatctgtacagcattactccctctagtggatctaaaaaaataaccatattgataagaatttcatccatcttttggggaacaatagtaaaagaaattttcataataatcatcatgctgatcagtgtttattttaatggttaatctgaattaatttttcttttctgtgtagtatactttttctttccatacactctcctgtaaaaaaaggtacttaacatttaccagaataattaattactcataaattagaaaatgacagacatttcaaacattacttacaaggataaaaattcaaaaactattgaaggtagtattatactcaacataaatcgtaaatattcaatgagtttcgcagtcactttaaagtaatgtgcaactgagagggtcattgtaatagtctattcacccacgaactgtttaaaattgggttagtgatcatttttaacccatttatgctggaggttgcaattttttgaatttttgcataagtgaaaaatcagaccttggcgctgaccttgagcagtaggatataaataactcccacaggcttggtgttccaatagtggaacactaggcataaaataataagtaatcattcaagtttcatgtctacttattttataaagtaaattttcgaatataatgcaagtattcattagatcctcaaatctcatttgttgcttagagggtttttgtgaacattttttcatgccatcactgtgtcttatatttgggagcagagaggtaacatataaataaaaagatgacacgtgtgtgttggcttaacttttgagtttgtcacaactcagtcacagatgttgctactagggaacagacacctaaaaaggggtaaaaaaaaaaataatgatgttcagttgagctgatctctgtagcctaatccaagtgaaattttaataattagacagcaatccctgctattagatgatctgggactggttttactatcgcaaataactgaatggagtttcacgtatctttttagaatgaagaatttgaaatgacaacaccaccttagaggtgtggggctcttgcagaagtgaatttaggtaaaagactgatgacaaggtttcgttttgtctgagaagtaacatttaacggcaggcaaagagatacatttcccaccaaaatcgaatgccactaccatctgcaaccccacagaggctcagctacctaaaatggaaatgaaaatataatgtatggaaatattctcttagaaaaactccttaaggcttcacatgtattaatgtattagtttgcaaacattaagatcaaagccaaagcaacaaatacatcctaaaaagtttttcgtcagatttttattaacgatatacaagtagcagggcataaaaaattaataggcccaagcgttgaaatgtcaaacccaatgatctcttccatgctcacctcttttgcttttttgtttcagtcttgctggcaccgggtcttcttgccttgagcaactctacacggttaagaaaaggagaaagaaaggttaacagatggtttaagagcccctcatctgttgcagtaagttaaaaaatagcaaaggaaggagaataggatccaaggtgtcaaaaacgcaaggcctaaattcatagacgtgtaatttcaagcctttgggcttacccaataaaccgttaaatattcagttttaaataaaatctactgtaggtttctttaaaaaaaaaaaccaatttgcttataatattgctaactcaagtttaaaatacagtttctcttcctttttaagtctttaaaatgctgtacattgtccttctaccctcattagcctctctatataattccatgcacccaaatcttttatttccaagaagcctaactaatctgatggagcagccaccacaaagcagagatagaaatgtggtactcactcctgtagtcccagcactttgggaggccgaggtgggcggatcacttgagcccaggagttcgagaccagcctggccaacatggtgaaaccccatctctactaaaaatacaaaaaaaattagccaggcatggtggcacatgcctgtaatctgagctactcggggggctgaggcaggagaatggcttgaacccgggaggcggaggttgcagtgagccatgatcgtaccactacactccagcctgggcgacagagcgagactccgtctccaaaaaaaaaaaaagaaaaaagaaaaaagaaatgtgcctaacacacacttctcacatatcccatggtgccaaacttttagaccccaaatcacttcgacaatgaaatcaaacctgaattgctaacagttatttgcacaacatctgtctcagatataagccagcaacacaaggccggacatcctccttccatgctgtttagcatgtgctgatataggaaaggcctaaagaactatgtgaatgctgggtgtggtggctcagcctataatcccagcactttgggaggccaaggcagctggatcacttgaggtctggagttcgagaccagcctgggcaacatggtgaaacccccatctctactaaaaatataaaaattagccaggcatgatggtgcatgcctatagtcccagctactcaggaggctgaggcagaagaatcacttgaatccgggaggcagagatcacaccactgcactccagcctgggtgacagagcaagactccatctcaaaataaataaataaattttgacttgaaattccaaaagaaaaattttgcctgtttctaatctatattgattagcaatatattgtaaacagaacaaatgaagaatgaccatactaaagctgaaacactctgcttaaagagagaacaatggcagacaccatcatcagagggacctggaagaggacactgaccccagcagggagttgtgatggaagaggagacagcttcactgtgtacagaagaataagcttcctactactggactgggggtggctcccatccccgggaccagtgtctgtctccagtcctgagcgagtcaaggtagagacactgagtatgcctaggattggatggtctgaataattccagctgtttctgggctataggaaagatctctggttgtcctgtacctggccctggggtgacttagtacatggggaatattggcttggtgtgtgagaatttgataaaggagatggttgtgggttgggctctggattggttggtttgtatgttaaaggcatgcttgcaggggagtccttggctatctctaggaattatctctagtgctggaaggggcagtctctccaggatcaaggcccgcaaatgcttgagcatgaagaatctagaaaatgagaaaacagagtcaatacagagtagaaatggtaagtctatctaactcttgagaaattttgccataaaggggagcagggaaacgtggttatagacggggcagacatgatacaagaagtgcttttttttttttgagatggagtctcaccctgtcatccaggctggagtgcagtggcatgatctcagctcactgccacctctacctcccaggttcaagcaattctcctgccttggcctcccgagtagctggaattacaggcatgcaccaccactccccactaatgtttgtatttttaatagagacaaggtttctccatgttggccaggctgatctcaaactcctgatcttaagtgatccgcccacctcgtcctctcaaagtgctgggattataggtgtgaaccactgcccctgccaagaagtgcttttaataagagagagagtataacatgcttttatgctgctgggaagcaaggagttgagagaaaaagcaatgagtgggagaatgaagagatgagccactgagcgggaggagagatggggcgcagtgtgtgagtaggggctgcttacagccccaggagagccagggtgggaacagaggcggggaggctggtgtttttgatttcatggctggatgatgagacagttctcattttactgcttcttgtttctcagtgaaacagacaaggtcatctactgaaacatgaggaagggaaagggtgttgatgattgaaggagaaggcatgaaacaccagttttggagagtggcagagtgagccaactggagagatggatttgtgttgctgagccgtgctacaggcccacttgtggtttgtggtccttaagttaaagttgggctaagttaggatggtattggttgagggagttctgagtatttattctaagaagagggtatagctccgagtattctaaaaagagagtgtaactatctacacacatatagatagttgtatttctggctacctaaagaggaccggaatgatttagctcaaatgagaaaagaaattgtctccgtgaagtgaagttatgggtagtctttcttaacctctttccatgtttcagaattttcataagatgttccaaacagtatgtatttcaatatataaacagatgaaaacaataaagctatttcagaaatcggggaaaaaaattaaaaacccaacaaaatgaggttttgctgggaaagaaagcagctaacctaatttcctgtagaaaaactgctatcctaaatgtgaatgctttcttgactattaatttggatataattataaccctctacaacaggagaaagactaatgaatcacaggggaaaaaatgaaggaaaagcacaatactgcaaaaacataccaaagacaaaactgcaaagctactgaaaacataaaaggatgtcttaacaggatactcatgtcctcttgggagacttccaggtgaaatgattgaagatgattttccagccgttcctggaaggtggggtaaagaaagaggaaaaatttcctggcacgtcagtctatgaaataatataatgcaatatgaggggaatcttggacgggctgatacgaagtcagaaacccatgcaagggttgcaatctgtttcctgtttctctgcagtcctactctgttctgtgatggctgggacagatggggccccacagccccttccttgtcacatggcagactgagcaaaggggactgatttgggagggaatggggcgcctccagctttctgggcactgcaggccagcgggttatggaaggtcccgcttgccctgggcagccatgccagctggtggctggtgctttggaaaggtcctcactgtcagccacagttgcttaatctaaaaacccaatcttctgaaagtgtcagtgctgttggagctcaacgtctgtaagcttggccaaatatgtcaagaaggaccgacctgtgggcttagggggaaaaaagcaaatgaatgccaagtttacacagataggccacattttagtttacttttactaaatcttagcctttcattttgttggaagacatggagaaggcacacgatggaaagacccttcacctcctcccactttaaattttagggatgataaattaccgtgaaattaatttagttttgctattacacttttaccgtgagtcccgagccaaggacatttttatgttaaagtctttgtagatgtcatgtttttgtatgcctgaaatacctctgtgtataatattgatattggaaaaaaatctattaatattttgtaaaatgatatgtctggtatggcatttgacttcttctgggggaaaagaacataattgtgcaaaatgttagaaattctactatcgagactgcacaagtatgacagatacactaattccagtaagtataggtagagatcttcatgaatggggaactacatttgaaaagatcatttctgatataattggaaatcggggggattcttaagactctccaaaaaaacccacttttcctgagtactttgctttttaggcagaaaaagaattaactcctaaagccatcccactggcacaaagagagtcaggggttctctctggaattttgttataatagggctcagcacattctagcgtgattgttagtttcagacacttgccacctgtgtgcagttggtgaaagtaagaggaatgctactttgcctgacctcgtttaagaacaagaacaaacattcttttagagtttaaaactcaggactcatgctttaatctttcaaactcccatcttcccagggcgccctcagctttcatcagtgcttttctcatagtcatgcctcttatagttttataattttttaaaaggcaatactagatgagtttaaggcgctggtatccattttccattaaataaagtgtcaaaacttctgatactatactgtagagtcaccaccatgccaacagttttaatttcaaacacattttccccattctgatgatattagaacttcacccatggcactactaccttataacttttatttttaattaaagaagttaaattggcaacagaaaacactttgctttcacattagctttgttaataaaaagtgaacgtttaaagcagtgtacctgtggatgaaatcaagttccaagctccagtttcccctttatctcatgaaggcatcaagctaaaggtctatgcttatgacaatcttaaaacaaaaggaacaaggaaagatgaaaatatttaaaacccaactattttcagctgatggcaagtcaaaaaactacacgagatattttaatacagcaaagattccatccttctagatgctttgcaaaatgatattagataactaatcatgagaggcagcgaaaacctcaaagcaagtgaaataaaaataattataattaaagactgggtgtagcagctcacgtctgtattcccagcattttgggaggctgaggcaggcacattacttcaggtcaggagtttgagaccagcctggccaatatggtaaaaccctgtctctactaaaaatacaaaaattatccagatgtggtggcaggcgcctgcagtcccagctactcaggaggttgaggcaccaaaatcgcttgaacccgggaggcagaggttgtagtgagccgagaccgtgccactacacttcagtctgtgtgacagagcaagactctgtctcaaaataataataataataattattattattattaaagggaaacatggtagatattgatacataagaaggaaaacctacaattatcatataattaaagaagtaacattgaggcaatatagaacaatatacagaggtaaagcgtttccactatcatagtagaaacaaattaaaatacttttgatttggttaacataaagggaggaaaacaatctggatgtcttttttaccagtttattattattaaagcatgaatacttggggtttatgtaaactggtaaagaagatattcagattctctctatatatgtctaaagatatatatatgtataatatattacatatattcattatatattatcttacatttctatcacttacatattatgtaaatattcattcattctaaaattggaaaaatgctctatttctaatcaggctggaaaaacaaaataccagatttcaaattattcctctaaacttcttccacttttaaaaatagatacccttgtttattaaaaaaaacaaacaaaaagccttaaagcttgaagtgatactaaaaactcaaccatcataataaccaagaaaaatagtcaaaattatcttaagacacaattttattagacttcgtgaaggaaaactggaggagtgaccatgtggtcacctcccctctctctctccctcttaaaaccatgctaaaattgtaaggaactctaaacaaacgtgtaatttcatgaagatgaagagaactgaaaagaaatacatacacatgtagatagatgtgtcaagtgtgggccggatgtggtggttcatgcctgtaatcccagtgctttcgaggccaaggacctcttgagtcccagcgtttaagaccagcctgggcaactaacaagaccccatctctttagaaattagttgggtggggtggcatgtgcctgtagtcccagctactcaggaggctgaggctggaggatggaaacatggtagaagtagatgcagaaggaaaatctacaattaggctgaactacaattagggtgagcctcccaggcttgagcccaggagttggagactgcaatgaactatgatcacaccactgtactctagcctgggtgacagaggaagatcctatctttaaaaaaaaaaaaaaaagagagagagagagaaagaaaaaaaagtggatgaaggagttccagttctactgctgagatggagaaagaacactctagcctatctctcccactgaacggagctataaaacatacacagcatgcatggattagttctttgaggattccaaagggaacatgataaattaaagaaaaataacataatttgaagtatcaccaaaccttttttttttcccctccagtatcccccagcctggatgagacacagctggagcctggaatggacatggagcagacagagagcttcaggacacacccgctcattctggcttgaggagcaggaaaggcatctgccaacactccgagttaagtagaaatattacccacaccccatcatcaaatttttgtcattcattccctcacacctcagcccagagctacccacaggtgcctaaaattctgagggagaggaaatttcctctctaatcaggggatgtcccccaacaggaagggacaaatcttgtgtctacttgctcttccttccttctctccttctgtcttcccctctgtctctctttctctctcctctcccaactcttggccatgggaagtgcatggcagagcatgataaataaagcctccgctttctgacctgagaactgaaaatggagcacccagagaacataaaagtacctgagagatggtgaagaaatacgagttggagaagaccaccccataaagtcatttatgaactcctgggcaagcttccgagctgcacatgcatggatctaatcccaaaccactcaccatagacgtcgtgaactgaacaacagaataaagcatagcccagatcccagactgaccattggtggagcacatctgggacagatctgatagcactgcaaagactttgaaaatccaattcacattgacctacaacctttacatctggttagaacatgcagcctgaatccaactaggtaggtagaggtttgatatttaaaaataactataacgtaaagggcgggggcaaggaaagtaatagtaggacctatgtggtggttagttttcttctacattgcttctggcatagtaaaatattgattctaaatagacagaaaagttaagcatgtttattgttatccctggagcaatgaaaccatactaagaaatagatatcaaaaacaaaatagatacattaaaatggaatatttaaaacctttagatattacaccaatatttgtagcaattttatttttaatagccaaaaactggaatcagcctagatgttcttaaataggtgaatggatatcttagtccattttgtactactattacggaagacttgagatcaggtaatttataacaaacagaaatgtttctcacaattctggagactgagaagtccaagatcaaggggccagcatctggcgatctggtgaaggcctttttgctgcatcatctcatggccgaagggcaaagagagagagagaaagagaggaagagggagcaaaacttgtacttttatgagaaacccactccctcgataaaagcattaatgcattcatgagggtggtgtccccatgactgaaacatctttcattaggcctcacctcccaacaacaccacattggagatcgagtttccaacatgtgaactttgggggacacgtttaaaccagttcaaggggtaagcaatctgtggtccatatataccataaaatattacccagcaataaaaagaaacaaactactgatacacacaacttaaatgaatcttgagaaattatgctgagtgcaaaaagcctatcccaaaagattacaaaatatattatttcacttatataacatttttgtttgtttcgtttttcatttatttatttctttacttattttagagacagggtttcactctgtcacccaggctaaagtgcagtggcatgatcatagctcactgcaaccttgtactcctgggctcaagtgatcctccagcctcagcctcccaagtagttgagactagaggtgcacaccatcatgcctagtagagacatggtctctctatgttgcccaggctggtcttgaactcctggcctcaagggatgctcttgccttggcctcctaaaatgctgagattacaggtgtaagctaccatacctggccaacatttttgaaatgagaaaattttaggaaaggaatgaaagattaatggttgccagcagttcagaatggggaagccagaagaaggttggtatggttttaaaaagaaaacacaagagcttctcaggttctttgtagtattggaactgttcagaatcttgagagggtgatgggaacacaaacatatacaggtgattaaattgtatagaactgaatgcacacaaataaacacaagtaaaactgggaaaatctgaataagattagtggattgtaccaatgttgaattcctggctgtgatgttatattatagttttccaaactgttatcactgaggaaaactgagaaaactgtacaagagatgtctttgaattatttgttacatcttcatgtgaaactataatttaataaaatgttcaaataaaaaatttacaaatgtttcaaaagcccaaaagaaagcaggaataggtaaacagaggaaataaaaacagagggaatgaaccgaaaaaaaattaaatggtgggccagttaacatatatttataattgattaaatgtaaacagtttagatacaccaattaaaagacagatatcgcagaatagataagagtggtctaactatatgctgtttacaagaaacttactttaaatataatagcataggtaaaagtaaaaggatggaaaacaatataccatggtaatactacaaaagaaagctcaagtaactatatcaaaattagacaaagtagatattaggccaaaaagttggtccaaaaaacagaaaggcattacttttttttttttttttttgaaacaatttctctgtgtcacctaggctggagtgcagtggtccaatcttggctcactgcaacacctgcccagaaagacattacttaatgattaaaggatcaatttaccaagaaaatatagcgatccaaaatatgtatggaactaacaatagagcttcaaaatacatgaagcaaaaaccgaactattggaaatttaaaatataatgattaaaataaaaaattcaatctgtcccaaaatctggaagttcaaatcaaagaagtttgatatacttacagaaaaatgaaggaagggaggaaagaaattaaaagaaagaaaataggagagaaattttaaaagaattagatcaactagggttggaaactatcaaaaaaacaatgcaagaacaaattccaaaactaaagacaatgatgagttgccaagccaaaatgtctccctgagaaaccagcacaattaatgaaacaatacttactccaaggttcatctctataaaatttcagaactccaaggattaaaagaaaattctaagaaaaacaggtcacatagacagaaaaagccaaatggtattggacttcttaatagcaccattggcttccattattgctattgagaagtcagctgtccgtctaaattctgttgtttttatgcaatctgcctttactccctggatatttttaaggttttacagatctcttcatattgaattatctgttatttcatcatgaaggatctcaagtggagttttattttgttttgtcctgttctctatcctacttgggattcattatgattcctgaatgtgaagtttcattttttttcatgagttctagaaaattctagtatatagctctgccatttttcttttggatactgcttctttttcattctatttattctctttttctagaattccaatgaaatgtatattaggcattcttaccctatcctttatgtcttttagcctgtgcttcatatttcctatctccttgtttctctatactggattctggatagctgagctctgctttcctgtttgctagttctctcttcagctatgtctaatccgctgtttaaccataaggttcttatttcaatgtgttttttttttcatttttagaagttctatttgaatatttttcaaaactacctgattttttttcttagtttacaattctgttttctttttttatttctttcaacatgaaagcacatttattttatattctatgtcttaaaatttatagtatctgaagtctttagggaactaatttctactctttgttgtttctgctaattttcatttgcaatggcatgtttgcttgtgtttttcttgatttttcaatatcagcttatgttcatcaggacttttctgtggggatttcatgaggcctggcttgggagtgcattcctccagagaagatctgcatttgcttcttttaggtacctgaagatattcccaatccaggaccactttacattaatttcttggcttgagggttatgtactgtgccagtgccataaattagaatgtcacaccttatgaaggctggtctgaattctaaattatcaggggaagtttctttttctaattctgcccagggtccaagctgaaaaaaccacatttccttactggatcatctcttttaactgcacagatgtgtctctagatcaacactgttcaaacctttcaactttcacaggccaaggcccttgcaccccgcaggtaaaactcaagactccaggtggtgggaaattaccaggcaaccttagatagccactttgtgacaaaaaggttttgggatatctagtctatcatattgtcagaaatggaaataaccaatccttcttttcacttcctctagattttgagtgtagaactgctgagtgaatctaagtgagacaaaatccttttcccacacaggaaaatacaatttggtgtttggaaaaaggaaattgggccaccatctttttcttagattagaggaatctaattaaactactatctcttgtaatcaagaaacatttacctgaagttcaacaatttctaccatttcattttgttatattttgaacattacattcaagcaaaattacataatgtttaataaactttattttctagaacagttctacattcatagcaaaattgagaggaaggtacagagatttcctatataccctctacccccacacacacacagcctcctctattgtcaacatctcctaccagtgtggtacatttgctataactgacgaacccacattgaaacagtattgttgcctggagtccatagtttacattagggttcattgttgatcttgtacattctataaatttgggcaaatgtgtaatgacatacatccacaattgtagtattatactaaatagttccattgccctaaaaatcctctgtgctctgcctattcatctttctgtccttactaacccctggaaaccactgacttgtttactgtctccatagttttgcccttttcaaaatgtcatgtagttggaatcatgtagtatgtagccttttcagattggcttattttacttagtaatatgcatttaagcttcctccaggtctattcatggcttggtagctcatttctttttagtgctgaataatattccattctctggatgtgccaatctataaagactgaaagaggtgcctacttcttcaaatgcacagacaccaacacaaggccacaaggagcatgagtaatcagggaaacataacaccaccaaaggaacaacataaagcaccagtaaccaatcctttaaaaatggagatctatgaactgcctgataaacaattcaaaataatcacttaaagaaactcagtaagctgcagataatacagatagataactaaacgaaatcagaaaaacagacttagaagcttaacaaatagaatagaagccatagaaaagaaccagtaagaaattctgggcctaaagaacacatgactgaactgaaaaatttcatatagagtttcaacagcagacttggtcaagtagaagaatatatgcaaatcaataaatgtaatatacacattaacagaataaaggatgaaatcacatgattatctcaaaagatgcagaaaaagcatctggcaaaattcaacatcacttcataattaaaaactcttaacagattaggtgaagaaggaatatacctcaacatgataaaagccatatgtgccaagcccacagctaacaacatactcgatggcgaaaagctaaaaggttttcttctaagatctggaataagacaatgatgccaattcaatttaataaaggcattcaaataagaaaggaagaagaaaaactggctctgtttgaagaggttgcatacagaaaattctaaagactccaccaaaacatgtttagggctaataaatgaattcagtgaggttgtgggatacaaaataaacacagaacaatcagtagtatttatatacactaacatcaaactatccaaaaagaaatcaagaaatgatcccatttataatagcaataaaaacataagattctttttttttttttttttttttgagatggagtcttgctctgtcgtccaggctggagtacagtggcacaatctcggctcaccaaaacctctgcctcccgagttcaagcaattctcctgcctcagcctcctgagtagctgggattacaggcatgagccaccatgcccagctaatttttatatttttagtagagacggggtttcaccatgttggccaggctggtgtcaaactcctgacctcaggtgatccactgccgcagtctcccaaagtgctaggattacaagcgtgagccactgtgcccggccaaaaaacataagattcttaagaataagtttaaccagggaggtgaaacatctgtacactgaaaatgataaaacattgattaaagaaattgaagaggaaacaagcaagtgaaaagatatcctatgttcaataattggaacaattaatattgttacaatgtccataataccaaagctgtctacagattcagtgcaattcctatcaaaattccactggcaattttcaaagagaaaaaaatattaaaattcatatagaactgcaaaagaccccaaatagacaaagcaatcttgaggtaaaaagaacagagctagagcaagaacactacctgacttcaaaatatactacaaagctacagtaattaaaacagcatggtagtggcataaaaacagacacacagacacagaggaacagaatagagagcccagaagtaaacttacacatttatggtcaatggatttttgacaaagataccaagaacacataatggagaaagggcagtctcttcaacaaatggtgctagaaaactgaatatctacatgcagaagaataaaactgaaccctcatctcacacaattacaaaaatcaactcaaaatggactaaagatttaaacatagacctgaaactgtaacactactagaagaaacatagggagaaatatccttgacgttggtgtgggcaatgatttcctggatatgatccccaaaacaaaggcaacaaaagcaaaaaatagacaaacaagatgacatcaaactaaacacttctgcacagaagaggaaatagtcaaagagtgaagcaacatcctacaaatgaggagaaaatatttgcaaaccacacatctgataaggagttgatatccacgctatataaggaactcaaataactcaaaagcaataaaacaaataacctgattaaaaaatgggcaaaggatctgaatagatatttctcagaagaagacatacaatggccaacaagtgtatgaaaaatgctcaacacaactaatcgtcagggaagtgcaaattaaaagcacaacgagatatcaccttaacatctgctagaatggctgctatcaaaagacaaaagataatgagtgttggtgaggacgtggagaaaggaaactcttgcacactgttggtaggaatgtaaattagtacagacatgacggaaaacaggatggacagtcctcaaaaacttaaaataagagttgttgtatgatccagctatcctactactgggtatatatccaaaggaaatgaaatccgtatgtcaaagagatatcacacactgccatgtttactgcagcattattcacaaaagccgagatatggaatcaatctaagtgtccctcaaaagataaatggataaagaaaatgcgggtgtgtgtgtgtgtgtgtgtgtgtgtatacatacaatgaaattctattcagcctttaaaaggaaaaaaatcatgccatttgcaacattgtggataacctggaggacattatgccaagtgaaataagccaggcacagaaaggcaaacactacatgatcccacttatacatgtggaactcataaaagcagaggatagaatggtggttcccggggtggggtggggcagggggatgaggacatgtcagtcaaagagtacaaagtttcagctagacaggacgaataacccctggagagttaatgcaaaaatggtgactatagttaacagtaatggattgtatacttgaaaatcattaagagcatagatcttcaatgttttcaccacaaaaaaaattgcatgataactaagtgaagaatgaatatgttaattagctaattgtgttaatcatttctcaatgtgtgtatatatacttatttatatatagcaaaatatcatgttgtatactgtaaatatatacaatttttatttatcaattatacctcaacaagctggaagaaacaaatgaagttaattctcttaaaaaataacatctcctcttgccaggcatggtagttcacacctgcaatcctagcattttgggagtccaaggcaggaggatcgcttgagaccaggagttcgagaccagcctgggcaacatggcaaaaccctgtctctacaaaaaatacaaaaattagccaggtatggtgttgcactcctgttgtcctagctactcaggaggttgaggtgggaggattgcctgagcccaggagacagaggatgcaatgagccgagatcgcaccactgcattccagcctgggcgatagagcaagacgctctctcaaaaaaaaaaaaatcctcttaaaaagatagttttatgtatctacctatgtatgtatgtatgtacctatgtatttaccttcactttcttcctaaacctcactaaaattatagtaaagttattttctcaaaaaaataaagaaatatcaccataaacctcaagaagagaaaaaaataacaacacatttttagaaactggaaagcaaatgaagaatgactttgcagatacaagaatccaaatcttgacccgagaacttacctaatgtacaccacactgccctccaaatccttccatctgtgcaaatcccattcatgaaggcttccttcttttcaacattagcaagattccagcccgccctcaattcattttaaaatcctgcctctatgaccccaataataataacaaacctttacctatagaacatttgcaaagttcccccatgtaatgacaagactttttaaaaaacaaaaaaacacaaaaacaggatctcactgtgttgcccaggctggagtgcagtggcatgatctcagctgactgcaacctctgcctcctgggctcaagcgatcctcccatgtcagtttcctgagtagctaggactacaggtgcatgccaccatgcccagttatttttttttttttttaagagacagggttttgccattttggccaagctggtcttgaactcctgggctcaagtgatcctccctccttggccaccaaaagtgctgggattacaggtgtgagccaccatgcctagccatcaatccttattttaatggattggctttagcatttgatggttctcagacaagatcaggcgcattcagggtggtatggccatagactatttgatggttctcaaattgtttcttattgttcaatattatttctccagtttgagtgtaaatgtcttaagaaatgaatttccattttatccagcactaaactttttcacagcaacagactacaaagaggtaatcagtaagtacccgcagttcctagaagatgcacctactgataatcattacagccaactaactagtgtccaattagcagtcaaaaataacagtagcaagtctctgtagccatttttaagccttgcctccaaaaaatatgccatttgtcctgtatgacagcaggtggcatatcagagacccatctttccacgtactgcagggtgacctgcctggtttagcatttagcaatcagacttttttatagcaataaaccccatgctgagtaggcaacagatgaaaaaaaaaaaaagatgccttttatggcacttcatgataatggctttattgccaaaagccgtattagcagaagatgaaagattcaatttataatctcctgaatgtctggatgttcagcctgtttctgcccaagaagagatcagtgcccgtggaagatgtatttgaaggacaatccacagtctattccgctctgccgagaaagagtccacattcttttccctttcaagccaaaaggaggcaaaaacaaccaaatgaatgagttcatgccgctctgaacttcagcgccagagtgaagcgttgagatttagggccacccgactccttgtgacgatctaaaagtcgcttagaacaattcacagcaatgtcagaaaaaacttcctgctttttgagacaacaaaaccagatggaaaactgctaaaatggctcaagtatgtggcacttttataatgtttatgtggctcttgtaaaaaagcagctttaattgacttttttgcttcccatgtcctagttctgtcaaaatctcttctggttttggggggggacttaaatgagagaacacaccattcagaatatactgttaattactataattcagaaacaatgtcctccttctctggtccttgccaaaaagccaagggagaaaggcagcagaagggaaaatttaaaataaagcacatttctaaagacggcattgaaaacaaagcaaacagtggaattgcactggcaagaaatttcactgggccgggcacggtggctcatgcctgtaatcccagcactttgtgaggccaaggcaggcagattggcttgaatccaggagttcaagaccagcctgggcaacatggtgagacctagtctctataaaaaatacaaaaaatttagccaggtatggtggctcatgcctgtggtcccagctactcaagaggctgaggtgggaagatggcttaatccagggagttcaaggctgcagtgagctgagattgtggcactgcactccagcctgggcaacagagcaagacctcatctcaaaaaaaaaaaaaaggaaaagaaagaaagaaaatttcactgggagcacccacccctttgtgtgacctacagaataccactaaatatctctgtttcatatcatcttcatataaataaggaagttaatacacttctacctcaaataccaaatatcagtgctgaaggagaacttgataccttatttacttaccttattctctacatgaagtatctcaaaaggtgttttgcaaataagtgctattcttctcatccttagaaggtataggtaatggatttaaaaaacacacaaagagataaaaactctttcactttctttatgaacaaatttgacctagggttaactttttaatcctgttcccctggaaacctgataaaggtggaatgtcggctgtgtcaccaggctgtccttagatgacagaaggaggtaaagagatgagcccatggaagactgagtaagtagtgctaagtatggctgatatggggccatgggtctggctagacctcagaaaacccccaagatggaagcttaatagaacaaaatcagtatatagatttaaattatgggtgtattttagtcatttaatcattactgttttctcttttttcaccttttttatttaaaaaaaattatttaaaagtcaccaccaccaaagtcaagaaacaaataagacaggcatggtggctcccatctataatcccagcactttgggaggccgagcggggaggatcgcttgagcccaggaatttgacaccagcctgggcaatatggtgaaaccacgtctctacaaaaaaaatacaaacattacccagtggctgtagtcccagctacccaggaggctgaggtgggagaatcacttgagcccaggaagtcgaggctgcagtgagccaagattgcaccactgcactccagcctgggcaatggagtgagactctgttaaaaaaaaaaaaaaaaaaaaaagatagaaagaagaaaaaaagaaagaaagaaagaaagagagagagagagagagaaagaaagagttaaaccagcccaccccaaaatccctccatgttccttatcccaatgtcaacccctcccactccactaaaggaatgaaagaaatgaccatcctggctttttgtaatgatcacttcctcgcttttttgagggagaagggggtgattttatccttaggtatgcaccctagacactatagtcttgccattttttaaaatgttgatgtgtattttaggtgtctcctcattttgcagaatccctccatccctttgtttttactgtaatttatctgttgaaaaccctggggcctttgactcgtagtttttcacagtatggctttgctgattgatactgttggtataattcaacatattcctctgtatttcttgcaaattggcagctggttctagaggttggatcagactcaggttcagtccctttagaaataccataggtggtggtgagttctttcattaggaaacaaataaaatccgacgatttttctttttgtgacgtgagcagctgttaatgcacaatgcctaaatccattaaaatgtgatattctaattctgccatttcttttttattcattagttagaatatttttataattaaatacactccctcttctacctctggttgctattggaccagatcacctaggaaagacaggatgaatgcttgaatctttccctttatttactaattttaagatcatggaggctcacacctgtaatcccagaactttgggaggccaaggtgggcagatcacttgagcccaggagtagaggaccagcctaagcaacatggtgaaaccccgtctctacaaaaaatactaaagttagccaggtgtggtggtacacgcacatagtcccggctactcgggaggctgaggtgggagaatcccttgagcccatgaggcgaaggctgcaatgagctgagatcgcaccactgcacttcagcctgggtgacagagtgagaccccgcctcaaaaaaaagatcatgtattggattcctgttgtcctccgaaggagagtaatccggttttattttaaaatcataataatctgtgaatttaaacatattttgatgttttgatatattataaatatttctcttattttagctcacatggtcccaaatttggcaatagagatctttttcaaattaactcctgagtccttttgacatgatcttaaattctctgctaacttcctcactatttactataataaaatgttcctgttttattttgtgcatctgctttctttctttctttctttctttctttctttctttcttttctttctttcttctttctttctttctttcattttttgtttttgtttttgctttttttttagacaggatctcactttgtcatccaggctggagtgcagtggtgttatcatagctcactgcagcctcgacccactgggctcaagacatcctcccacctcagcctcagatcttctttgcctatctgcaaaacatttgtaacttcttctagaatttcatctctttcctcctttattttccacatttttctcctttcaactattttaaagacattatctgttgttctatttgcatgtatattcctcctaatttagtctttatttctgatttttttttcttctgtttttaggggtttttctcagttccataagctttcctgctggtctaattctgacttatgttgttcttgcatgtcttatagtagctgggactatatagtcctgagtagctgggactacaaggcacatgccatcactcctggctaatcttcttttttttgttttttctgtagagatggggtctctctgtgttgcccaggctggtctcaaactcctgggctcaagggatcctcctgccccagcctcccaaagtgctgggatcacaggtgtgagccaccctgaccggccccattttggacattttctaccccagatctggaatcagccatttatccaagagctctgatttcttttagtgggaaatggtattttaaaactaaaatctgggcacgagagatgcgcattgctaggtcttttcattagtcagaacaagaaatatacatacacatacatacacataatattttttaaataaaatacctcgagttatattgataacttctcatttaaatcaaagttttttaacatctcttctgaattacatctatgtttcttttctgccatactgggaaccccagttctttaaaacacaaaagataatatagttggaatatctcataattttctgggatgcaacagtttaatggtattaatacagccacctccaaccttaagggggtgctaacctgggaagaactggtgttatcaccgacagaaagaggcaccctggatgttttgacgtggttcacgtgaaagatgccaacagcaacagctttgccacccagctttccaacctttttgttattggcaagggcagcaaaccatggatttctcttccccgaggaaagggtgtccgccattcaacccattgctaaagggagagacgagactgtggccagagcagtgggtgaaatggtctctgggtgacatgttagatctttgtacataattaaaaataacatggcatgattaattttttaaaaggctttaactgaaaacagttaaaaatgtttttgcatatgactgctcctgtctccccctatttttttaaagctgtgctaaatttacagtgtcagaacatatagccaacatacagccattacaagccatactctttcttttttcctctcatttagtccaaggtctataagtaacttattctgttgtctatctagtcttttgggttgtctgaagattttttttcttgtagattcctcaagaaaggttcatggaagcactattttctgagttcctgcagattgataatagtaatctttatacttaaaaatcagttttcctggatatgacatctttgcctctcattttatttccttgagtatcttaaacatatttctccatttttttctggcataaaatattgctgtgaaaaaaatctgaaaataatttaattgactttctcttctaagtcacttgctcatcttgctgcaataagcaaatgatttttttttctttctagttcaattatttgactagaatatgtctaagtgttgatcattttgagttatccattccaggatcgatattctcaagtacatggtgagctctttcttttttttttcattaatcattccatgttatttttaattacatgcaaagatctagcatgttacccagagaccacttcaccattgctctgttttacccactgtttcacccaccatttcacccaccaccagtctcttgtctctcccttcagcaatggtgaggcggataccctttcctcggggaagagaaatccatggtttgttgcacttgccagtaacaaaaatgttggaaagccaaggggcaaatctgttgccattggcatctttcacatgaaccacatcaaaagatccacggtgcttctttctgttggtgatcacaccaattcttcccaggttagtatctccaatcaccatacacaggttaccagtgtcaaacttgatgaaatcagtgatcttgccagtctaaacagtgtcattcaccttgacgaaggagtcaaggtagtggatggtgtgagcatcgtggaaccaggtgagggattccttttgtgcccacaaagatttttcttactttgcacaacttgtacttggcctcctccagtgtaatacaatgtacagcaaagcgaccattgatgccacagatgagacagaaattctctcccgtcttgtgaatgctgatgacatccgtgaatccagcagggtaggttatatcaatttggaccttgccatccatcttaatgaacggctgcatgcaaatctttactttgtctcctatgagggcatacttaagtctgttccttaggaaaatattaggagagacactctctcagcttgtggggactggtggttggacaaggagcaaacacactagtcaattcatccagcatccaatgctgtggagctgctacccgcttcagatgcttcctaagaccacgagccacgactgtattaggcacggaaagagcatggtgagctctttcaacatgcaattccaaatatttttcacttcaggaaacttttctgaaagtatagttttcagtgtttgttttctatccttgccttggttttcttcttcagggactcttattacgtaggtgttggatcttctttgcctatctgcaaaacatttgcaacttcttccagaatttcatctctttcctcctttatttttcacatttttctcctttcaactattttaaagacattatctgttgttctatttgcatgtatattcctcctagtttagtctttatttctgaattttttttcttctatttttaggggtttttctcagttccataacctttcctgctggtctaattctgacttatgttgttcttgcatgtcttatataattttctcagtgtcttttaccttcttttgaatgagaagattacagtgttgatttggtttgtgagcttgtctttctacatattttctctgtctgaaaaagtgttattctgctctttaatctctttttaaaaataataacttggtataggatttgacctcaattgcttgctcatttttatgtaaaattaattttcctgaaattttagaagaaggagtgcctccaggtagcttttcttatttcacagaacccccgcttcacttatgctgtctcctccaaaatttggaggtttgctttttgagatgtgctggctctgtgcccctccagctttttcatctggaccttctccttccttcatctttattggccctgctctgctcaattcaatttctattcccagcagttgcttctcagtgtgggagcctatcctgaaaggtacaatttcagagcatccatgggagtctcctccaggcccttgagaccttaccccaggcagcctgtgctcgtccatgataagagaggacaaaacccctcccgatttcagtgactgttcccagattggtctgctgcactttccagttaacacctgtttgctctttgaggatgctcctattctctagtctgtcaaataccccattagttccctctgcattcttccacatagacactgatactctaaaggtcttgtggctgttgttggtttgtctttgccatttttgttttgaggtttctgggaataccttgtaattagttttgttgtaaatgtcatccatgtgtttttggttggccactagtgctctattttgtttacaaatttgtaaaaggtagaaagctctgccaccatcttcccagaattccttatttttatttttaatttaatatgatcatgcaaacgctaataagaacaccagataacaggatggacacttagcattgtgttacaattgcttacagtattcagtgcagtaacagcctgtacagatttgtagcctaggagaatagactaaaccatatagcctaggtatgtagtaggctgtaccacctaggttagtgtaagtatgctctatgatgttcacccaatgacaaaatttatggtaccataaatttatgcatttatggtgtcaacacaagaagttggagtgaacctaaaatccccaggtattataataggtatctaaaaactgttctgacaatcttataaaaaactcaatgtgtgttttttcatgcatttaatttctagatttgcttcagtgtccctgtgagaggctcacatttatctttcctttatgccttaactccattgcctgtgtaatgaggataatatttttaatattagaaagatacaatttttattcccttgtagtcatattccaccaaataggtaaagctgtgattcagagtaccaggcaaggaatcagtcacagccaagaacagatggatccctattcagctttccatctcaaaactggctttttgggaggccacgacaagaccaatgccctgaaggctgagttttcttgaaaaagaaaggcccctcccatctccaaacccaaagttcctctataaatatttataatccaagctgggaggacttaccctagagaagactacttcttgcgacagagaagactcaacctgtgacacaagggacatttccactggataagaaagaaagaattcttggcactagggatataagagaaattcagaagggacccatcttgatccaggttcacatgaatgcacggcctgtggcaggtgttcatctatgatcacagctggcagatgtgcaggcaggttggccaccagctcagatgcatgtggctcaatcctatgggaccacccaaggagcttgatgatatgtggaaccacatcaccaccaccacagggaagaaaggggtggcgtttacccatcagcctccatgagttaagggtttccctaggggtattacctcccctacatttccaggttgcacatgtgtgagtgctgaatggggacacatgggaatcccatgtcccagcatcagaggttccaaggcaggaatcaggaggctgcagggaggtactgacaggtttcacctgtgcagtactggtcactgctgcagcaatgtctaaaagaagagttgagtacacaggcagtgcccaatataggacccagtgaagttcttataatagagaaagcaaatattttaatcagatgttctacctttcattacaatgtgattgtgacggtcaatattgagagtcaacttgattggattgaaagatgcaaagtattgttcctgggtgtgtctatgagggtgttgccaaaggagatgaacatttttgtcagtggactgggaaaggcagacacaccccctatctgggtgggcacaatctaatcagctgccagcatggccagaataaaaagcaggtggaagaacatggaaagactaaactggctgagtcttctggcctccatctttctcccatgctggatgcttcctgccctcaagcatcagactccaagtccttcagcttctagtctcttggaccatcgaccacagattgaaggctgcactgtcggcttccctactttcgaggttttgggacttggactggcttccttactcctcagttggcagatggcctattgtgggacctcattttgtgatcatgtgagtcaatactctttaataaactccccattatatacacatctatcctattagttctgtccctctagagaaccctgactaatacagtgattaatcactttctgcaagaagtgaaggtatgtacagagtctgacactagattttcattcattacacatgcaacaaagaacacataaagtcctatagactttataaatttcctttataaattatccagtctcaggtatgcctttaacagcagcgtgaaaaaggactaatacagttatcttttggtaactgcacatttaaggtgttaatttcatccttcaattgacagtctggggtcttcggcttggttgatcattgctccaagtcatcactgggcttggggtcaggaggctcatgccaggctctaaatgtcaagtacttactgggtactggacagagctctatgtccttgatgtgtttaactcatttaatgcccctatcaaccctatgaggtaggtacaattactatctccattgtccagatgaggaaattgggtaagttaaacaacattaagcagcttactcaggtcccacagctaaagtggtgtctttatttccagcacttaaaatgtttcttggccattcttgctcttaaggctgaatgacatgtctgccataacactttgtgcttctctttaatgctgtcttctttcctccctaaacttcccatggtttctaacattcccctttccacaacagaccctgactcctatctgagaaattacagccattaaacaaaaataactactgttcttgctaatttggccaaggatgtgtcccattgcctcatgcaaagcgtggtaccttccaggtccgtggaggtgctgggctggtattgggtgctcacggccactcctgagctctcaccgaatgcaaagcatggtgctctgcaccaggtgctctgggagcttgggaagaaaccataaacacatgaacacacagataataccagcccacaaatgagcatgccagcagagttcaggaagggagaaagcactgaactgaatgggagggctttctagataacatttgcacagatgggaaagagaggagacggcatttccagcagggagaccaacttcagaagaggcacagaagtgggaatgcaactgcaattgctattctgattctaggcttggtgggaaaaaaaaaatgctggcagagactgccactagtgctaggaaaaatacgcaacagtgtacgccatcaatcagcaaagtgtggccttcatgttgcttttttcttgaatatagttttttctttaactaccatgtctattcattttcagtcttctgtgactgccattaaataagacctaagagaggcattgttttggactgaaccccaacagaggccccaaccagaccaaaccaaaatggagtcacttgtgctaagtgccacatcatcaaactgaaactttaaggaagcaggataattcccaaacagaccagttttccctgaagaacgggagatttgcagcaaccaatcagaaagggcagttaactctgccctttaactctgctttaatccttacaaggaaagtaaacttaaagtaacactgtcttggccgggtgcggtggctcacgcctataatcccagcactttgggaggccaagacaggcagaacgaggtcaggagattgagaccatcctggctaacacagtgaaacctcgtctctattaaaaatacaaaatattagctgggcgtggtggcgggcgcctgtattcccagctactcaggaggctgaggcaggagaatggcatgaacccgggaggcagagcttgcagtgagctgagatcgcaccactgcactccagcctgggtgacagagcgagattccgcctcaaaaaaaaaaaaaaaaaaaagtaaccctgtctttttttttttttgaaacagaatctcgctctgtcacccaggctggagtgcaatggtgcgatctccactcactgcaacctccgcctcctgggttcaagcgattctcctgcttcagcctcccgagtaactgggactagaggctcacgccatcacatccagctaatttttttgtttttagtagagacagggtttcaccatgttagccagattggtctcaaactactgacctcaagtgatccacccagctcggcctcccaaagtgctgggattacaggtgtgagccactatgcctggcccctgtcttattttttgtattaagctgttcccttgttcctgctcaagctactttacaaaaataaattgtcctgccacacctaatgcagcacctttctatttttaaatgggatgctgcccaattcgtgaattgatagtaaaagccaattagatcattaaaatcaatttaataaagttttttattgacactgctttcccattactacaggagagctgagtgagagaccatatggcccccaaagtctacctagccttacagaaaaggcttgctggctcctggtctagaatatcaaccttccgaaagaaaagctgccaaagccaaccagttggcactatgggtgtaaaatactcacacccatttatcctaagtttacatgaaattcaagatacccaagctaattgcattctcaaaaaaaggtatcaaagaaggtaaactgtaaaaaaaacctgatactacagattcaaatgtaactgctttccatgtttcaaaagattctggagcacactctaatctggacagattctatagatagggactgagactcccaaaggagttgggattttaataagcaaattctctccttcattcatagcaataaacacaaaaatgttcaaagatcatctgtattgtatttgttaagaatatgttaaataaaagaaaatatacacaatccattaatgtgaaataacttgaaacaaaaattcagttaaagaattggttttacaaggataaagatcaccaagttaaaatgcattaattccaagatcattttaccaaaagtatcactgagcaagatgattccccatctcccaaaatgataattaaaggagaatgtggatgtccatgtatgcttagatatttataggaatgggggaaagacatggtggacacacagatcagaggcatggtaggaaaagcccagcattgaaagacacaggccttggccgggctcagtgactcatacctgtaatcccagcatttggggaggccgagacaggcagatcacctgggtcaggagtttgagactaacctggccaacatggtgaaatcccatctcttcttaaaatacaaaaattagctgggcgtggtggcgtgagcctgcaatcccagctactcaggaggctgaggcaggagaattgcttgaactgtagagactgtagtgagctgagatcacactactgcactccagcctgggcaacagatagagactccacctcaaaaaaaaaaaaaaaaaaaggaaagaaagaaagaaagaaaaagaaagacacagccttagtcataactctgctgggaatgagtcgtgtgtccaaacacaagacacttagccaccctgggactcccctgcttcaatgaaggaatcctgctagattatctctaggggctttttccattttgagattcataaaaattaacagaacgtaagagtctgtttttgagcaagggaaaattgattaatttaatgaatgtaaacaaatagaatcctttctcagctttctgatatcttgtgtttacagtatttaaatagactttgtatacttgaaagaatatgattacttcatgtaagacctaatactatctaggcttctaagaaccttaatgtgttggacgtctcagatcagaaagaaaactgtagagaacaagcaaggaataaacacagaaatcccctgagaagagtaacgcggttaagaaacagcctgtggccttgagcagctgtgtgatcacccactaacggtgctcactttaagagtgtggcacagaaatgaggggaccgcacacatcaacacccccttccagcgctcatcaacagcagtaatgaaggccgccctccagggagaattagaatgagatttgggaaatggcatcagacacataagaaaagaacaggaaacatgttcaagaacagctcaatgttgccaaaagagcaaagatcataaaatgggggtggggagtggagagggaagactgtttcctgactttctcctgacagaggaaaacattctgggggcacagatcctggggagtaacaggaacaaaaacacccggggctggtgagtgtgcgaggaaggcgatggaccccatgggtgttcagccagaaagctgggagtatgttcctacgtggccacaaagcagggccgggaatcagacccttccaggggccgtcggagagagcgatcaggctcggagatgtggataggcagccgaacgcataggagcgggtgcgggagatcacccagagagaaggtgaagggtggggcctggctgccttgagggaggagaggctgccaaagatcaccgggagaacaaacgccaggcctgggagtgacataggaggcaggactggactcaggagacggggctcagacatctaaccaaatggaagactagctaaaacagggctgtgtgcagaagcacctttccgtaagacacacccaccagcgcaccatgtcggtttatcattgtcagggcaacactcgggagttactgcccctgtccatggcaacagcccactgactcagaagttaccaccctatttctaggaatttctgcataatccacccctcaatttgcatataattaaaagtacatatagccgggtgcggtggctcacgcctgtaatcccagcactttgggaggccgaggtgggtggatcacgaggtcagaagatcgcgaccatcctggctaacacggtgaaaccccgtctctaccaaagatacaaaaaattagccgggcgtggtggcgggcgcctgtagtcccagctactcgggaggctgaggcaggagaatggcaagaacctgggaggcggagcttgcagtgagccgagatcactgccactgcagtccagcctgggcgacagagcgacagagtgagactctgtctcaaaaaaaaaaaaattaaatggaataaataggaaatagaataccacagaacacaatagaagatgtaagagaacatccaaataataagtattgcttccagaaacatgaaagataagtgtgtgtgacctggaatgcaataggaaaagagggtctcaatttcactaggaaattgaatgatgaagtgcatcaaaaagtggggaagtcgccgggcgtggtggctcacgcctgtaatcccagcactttgggaggccgaggcgggcggatcacgaggtcaggagatccagaccatcctggctaacacagtgaaactccgtctctactaaaaaatacaaaaaattagccaggggtggtggctggtgcctgtagtcccagccacgcgggaggctgaggcaggagaatggtctgaacccgggaggccgagcttgcagagagccgagatcgcaccactgcactccaacctgggcgacagaccgagactctgtctcaaaaaaaaaaaaaaaagtgaggaagtcacagacataaaggagaggctggagaggatacaggaggcagggctggggtatgggtgaaagagagtcagagagagcaacaggaacaaaggaggagaggatagggtattcttatggggtcttgctatgttgaccaggctgaatgctgctcaagcaatccttccacgtagctgagactataggcatgccaccgctggccaggatggcgcattctgataagcaatgagtccctccttttttttttttttttttttttgggagtggggacagattctctctctgtcacccaggctggaatgctggaatgcagtggaatgcacccggctaatttttgtaattatagtagagacagggttttgccatgatggctaggctgctctcgaactcccgacctcaagtgatccacctgtcttggcctcccaaagtgctaggattacaggtgcaagccacagcacctggcctcagtccctactctctttctcttcctctctcactccctctcccttacatctgctccatcacgaaggcttggccacgaggctgcaagttaggaagatacaattcagaatacaaagtagaaagtcaaacattagccccttctagttccaaggaatttgagggtgagggtatgggaaggaaaggaggggactgaaagatgaggagaaagcagggcagtcaatggcctggaggatgcaatcaaggaatgatactgggaggggcaacttcaccagaagggcgtgaggatgcatgcaggatgcaacgtccgaataagtcagcaggtgccagtgatgaccgagctaagatgcattggctgaagtaggtatgggacaggtccattggctaatgtaaataagggacaaggtcaatggaacttcaaggtcaaggtgctagacagattgtacatgtgggtcccaaagtcctccaaggtggttgcaaggctagatgtgcagagagatcatgaaccaagtcctgggtgaacaaggctctcagtggtcatctccctgataacaaaattgctgccctctgctgatacagaacgggggcaggcctccaggagtgcagaggcaggctgagggtctggggctctaactggcccttagacagcctttcacataattttcctatttttagacccaccttcaacttcagtctgcctattcctaagtcttttggggattttgtcaaataaattgggatgctttatggcttttctcccagcagcttggaatacagctttcttgtgtctgccaagtcagctacctctcactcaagtgctttctagcttccaaaatgttgtcactatttttcttctttcttgtcctttttgttctaatggatttttctttttaaaagatccttttactcttgctttggttgggtttcaggaaggaccaaaagtaaacacatgttgaatctaccatctttacccctgagctacttttatgactgtaaaaaacaatagtgctgtattcaggctgggcacgaggctcacgcctataatcccaagcactttgggaagccaaaatgggcagattgcttgcaaccaggagtttgagcttgagcaacagggtgaaacattatctccacaaaataccaaaaaattagccggacatgatagcatgctcctgtagtcctaggtacttagggggctaagaggatcacttgagctcggagaggttgaggctgcagtgagctgtgattgtgccattgtactccagcctgggcaacagagcaagaccctgtctcacacacatacacacacacacacacacaaccaataatactatattcattttcacccacaaaaatatgtgctccctttgatgtgtgaacaaggtaccccagcctcctgcctcagggcagcctgatggagttggctaagaggtgttcagtcacacaggcactttcccctgagccaagcacatcctcccagccagaccgccaccacccatgggactgtgtctctcaatgacagttaccaccccactgggaagaaactcaccaaactgttctatgagccttggggcagggtggaatcctcatccatgtaaatcaaaagttttaaaacatcccttcactgtaatgtacacatatggaacccagatacatgatttaagaaaatcgtttcgtaagaaaatataatttcttcatgattaaatacaatgccatctagttactccttcctaaagctttgattgcaaagagtagtttcagatgtttcaccattatattcagaaaccaggagtgaattaagacaggcaatcacagaattgaagggcttcagaggtagaaagagccttagctacatggtcaaacagccagctctaaccaggaaaacatgccacccaaggctttatagaaatatgtgtgttggggccatgcccagatcttggggaccgacacaccaaggacagggcccaggcatgtacacatttatgaaactgcctagatggctctgccaggtaccaggcacccccaagaaaccacgcctcctctgtcctcataatatccctccatgtacaggggcagaacactggctctgagaatttgtgcaatgcaccaggtaggcctggcagaagagacactgaaagccaggctgacacatgttctgggtatttttacaacctgctttattctttcatttgtttatttattctttcaacagcaatgtgtcaggatcttctatgtcctaatgatagcaatatttattgagtgcttacagtctgcctggcacagttaccactttacaggggttatctcatttaatcctcatattaccagaaaggggtcccaatccagacctcaagagagggttctcagatcttgcctaagaaagaattcagggcgagtccatagagtaaagtgaaagcaagtttattaagaaagtaaaggaataaagaatagctactctagagacagagcagccccgagggcttctggttgcccatttttatggttatttcttgattatatgctaaataaagggtggattattcatgccttccctttttagaccatatagggtaacttcctgacgttgccatggcatttctaaactgacatggcgctggaggtagtgcagcagtgaagacgaccagacgtcactctcatcaccatcttggttttggctggcttctttactgtaacctgttttatcagcaaggtctttaagacctgtattttgtgccaacctcctatctcatcctgtgacttagaatgccttaactgtctgggaatgcaccctggtaggtctcagcctcattttactcagccgctattcaagatggagttgctctggttcaaatgcccctgacactcgcaacagtattatgaggtaggtacttttaatatccccactttacagttgaagaagaaagcacagagatgttaggcagtatgctaaggatgtgtaaccacccagcgggttcatcttgcctgctgcccagatagagctgatttatcaaacaggggaattgctatagagaaacaatttaattcatgcagcgctggctgaatgggagtcccgagttttattattactcaaaccagcctacctgaaaattcagagggtagggtttttcaactttggcaggcaagggaaagggcactgctgattggctggggatgtaattagaggggtgtggaaaatgtgtactgagtctgcttctgggtggggccacaggactggttggctggtccaggtcagaagggcaaaaatctcaaaaagccagtcttaggttctacaacagggatgttatctgcaggagtaattgggaaagttgctatcttgtgacctctggaataatggctggtcatcgtttatgcctacacctcagctgatctcggattcctctcatcctcctaacctggtgggctttacagaggtagtttagttttggggaagggctattgctattaaactataaactaaatttctcccaaagttcgcttgacccaagcccaggaattgcctaagggcagtttggaggctgaaggcaagataggggttggttagatcagatctctttcactgtcataattttctcactgttatcatttttgcaaaggcagtttcaaacacacagctagtaaatggtggtgctcaaagacagctccagaacctgggctccctcctaactgctaggatcaactgcctctcaggtgctctgtttccaggtatcacatttgttatcaggtgctctgtttccaggtatcacatttgttaagaggcgtagagagaaggagagatgggtgagcagtattacaacccaaccttcagtagggcagaggtggtcacccaggagccatcagaagatagaggggtgttcttgccccagaggttgggccagtgagctgagtcttgaatgacaggaagtaggaggggatgagggtgagggaggagtccgggcagcagaaatcacagaagaataccattgggaataccacagtagtgtaacagatccaaatttcagtgcctacactcaggtagcaagacgtaccatttcctcttttctttgagaccttaatgtctattaggatcccccattcctttgggtgtcagaaatagtttaattcagaggcagggtccacctttgccctcaaaccatgtcttcaactgggggctccatggagccatggtacaaatctatccttactcatcatctagccacaatgttcctactgaggctgcccacacggggtccttgaccaagaggtctgtggtttttcccgtcagaataccttcttgccttagtgaactctagccctcctgtccttctctagcaagagtcctcactctctcttccttcactgatacgcttctccaaagattctcatcaccaggtctccatgtcttcacctctcagccttcattcactactcaatacatggtcagaaggattctgttcccacaacccatccacattgttccgctaagatcacctatgggcaccatgttgctaaatccagcagtagctcttctcttcgtcttggctgacttctcactctcattccatgatagcacagtctcctgcattccctgctactactttaaccacacctgagcataaccttgatttttctcgtattgtcttgattttacctccagcctcccccaggaccaaatgtttaatccatcaacacgttctatcaattctattgtcaacaaatataggtcaagtccatggacttctcttcggtgccattgttaataccctgacataagctcctcttctctctcacctggattcatgaaacagcctctttacttggtctctctgcttctacgaaatgcagtccccacaaagcagtcacagtgatcttcacacacacacacacacacacacacacacacacacacatctgattatggccaggtgcggtggggtatgcctgtaatcccagcactttgggaggccaaggcaggtggataacttgagcccaggagttcaagaccaggctgggcaacatggtgaaaccctatctccacaaaaaaacacaaaaatgagccaggcatggtggcacgcacctgtagtcccagctactcggaaggctgaggagggaggattgcttgagcccaggaggtcaaggctacagtgagccatgattgcaccactgcactccagcctgagtgacagagcaagactctgtctttaaaaaaaaaaaaaaagaaagaaagaaggaaaaaaaagagtcagtataatgtttcatcacacttgaatactttactgtacggttcctaaaaaaaagcttattctcatataaaaccacaggacaaatatcaaagacagaaaattaacactgatatattattcccattaaatccttagacctcattcaagctttgtccaataatatcccttgtaacaaataacttcagaattacctgttgtaccaggttgtcatgtctccttagcctcctgcaacttggattggttccttagtcttcctttgacatccatgaagattacaggcaaagccaaggagggaggatcccttgagcccaggaattcaaaatcggcctgggcaacatagcaagacctcgtctctaccagtaataacaaaaaattaggttgggtaccgtggctcacgcctataatcccaacactttgggaggccgaggtgggtggatcacctgaggtcaggagttcgggaccagcctggccaacatggtgaaacccagtctctactaaaaatacaaaaaattagctgggcatgttggtgcacgcccgtaatcccagctactcaggaggctgaggcaggaagatctctttaacccgggaggcggaggttgcagtgagctgagattgtgccattgcactccagcctgggtgacagagcaagactctgtctcaaaaaaaaaaaaaaaaaattagctgggtgtggtggcatgcaccttcggtcccagttactcaggaggctgagatgggagaatcactggagcccaggcagttgaggctgcagtgagctgagattgcacccctgcactccagcctagacaacagagcaagaccccatctcaaaaaaaaaaaaaagattacaggcaagttaaactgtaggctgtccatcaatttgggtttggctttttagattcaggtaatgcatccttggcatacagttatttcattgcatcttattaagtaatacataatttcagttttcattgcatcttattaagtaatacataatttcggtttgcccgtttgttgatgatgttcagtttggtcacttgattaagggatggggtggggggaggtcttctggacttctgtactgtaaagagactttttctctttataattattgagtattttcataattcattcattcatttgtgaatgaatgaataattcataagtgaataaattcattcattcattcacttattcatttaaccaacgtgatccatggatttctatctttttcagtccattattctcattaatctgatgcttcaattgtcccagtttgggccgatggaaaccatttcaagatggcttctgtgtctttttatttgtctccatccttcttggatcccacacttaccttctggaatatgatgttctaggttcctcaggttcctcttgtactctcctagcccagtcatacttctttttaaacaagatgtttttgaagagacaggggtctgctctgttgcccaggttgaagtgcagtggcacaatcacagctcacggcagcctcgcactcctggactcaagcgatcctcccacctcagcctcccgagtagccaggactacaggcatgcaccactacctggctaattttttaaaaaaaatatgtagctatgttgcacaggctgctcttgaactcctggcctcaagcaatcctttccccttggcctcccaaaatgtggggattacaggtggaagccaccatgcccatgcccagcccccagccatccttctgccactcatattttgacacaccatgccaggtagcacttccacccccatattcactctgtccaggatctaacacccccaccccgcataccaggccacccaccatggtagaactccaacaccccatgccaggcagcgctcctaggtggatgcctgcctcaccttgcttgaatttttttttttttttgaggtagattctcactctgtcacccaggctggaatgcagtggcacaatcttggctcactgcaacctctgcctcccaggctcaagtgattctcccacttcagcctcccgagtagctaggactccaggtgcccgccaccactcccagctaatttttgtatttttagtacagacagggtttcaccatgttggccaggctggtcacgaactcctgacctcaagtgatccacccgcctcagcctcccaaagtgctgggattacaggcgtgagccacagagcctgacctcttgcttgaattctgatacccgctgcatggatgctctcacctgggagatgtctgatgcctcacatagggctgccctcttatgcggagcacttctttaccccactcatgatcagacaccccacactgggctgtcatcctacacaaatgctttccacactccaatgctccgatgctccaagctgggccggccttcagcagggaggccttcttatccgactcaggttccaatgctctgcatcagccaccaaacctcaccctggctatctctgacagcccaggctaggccatccccacccctcccatgtggataccctcctcacctgcttcaggatggtagggcttccctgctgctctgtatggatgtccaccttgcttggtcccacctaatgacttttaaaaggatttgttcaggaagagaaagaaacggaagaagtgggaaagagaaagaaataagcaaggcttttattttagaatcaaggggtgcacgtgcaggtttgttacaagtcttccatgatgctacagtttgaggtatgaatggtcccgtcatccatgtagtaagtagggtacccaataggtagtttctcagcccttgcctcaccacctctctcccctctctattagtttgcattgtctatttttcccatctttatgtccatgtgtaccaaatgcttagctcccacttataagtgagaacaggcagtatttggttttctctttctttgtcagttggcttaggataatgtcctccagctgcctccatgttgctgcaaagggcatgatatcatcattttttttatgctgcatggtattccatggtgtatatgtaccacattttctttttgtttgtttgttttttgttttttgttttgagacggagtctccctctgtcgtgcaggctggagtgcggtggcatgatcccagctcactgcaagctccgcctcccgggttcacaccattctcccgcctcagcctcccaagtagctggggctacaggcgcccatcactaagcccggctaattttttttttttttttttttttgtatttttagtagagacagggtttcaccgtgttagccaggatggtctcgatctcctgacctcgtgatccacccgactcggcctcccaaagtgctgggattacaggcgtgagccacctcattttctttatccagcccaccactgatgggcacctggaaaagcccattctcttgtaaacccattctaatcagacttttgtcccatccttccacagaaactgctcccaacaagttaaccatgacctccacaatggttgattctcacagctcactcaacagagctcttcctccttctgggtatgcctggttcacttgggtttgaggatacacattctcctggtttccttcctgcctcgtggaaatgccaaagtagagaagccacctgcccgtgaacctaagacactaaaatcctgaagtgtgtggactgcattcctgaattaaaggctaccaaaaatgtcactgtcatgacatacccaccccagatatatacaaagcagttagacgggaacaaaattaaggggataattattcattacaaaactactaccttcaccagaggccaaggttaaaataataatctaaacactaatcttgttcttagttttaattaattttctttaagatgctcatcaccattgagaaacctgcacaaatgaatgctaattcatttcactgaagtgaaagagaaaggggcttttttgttttaaatgcttttctgatttttttttaaattaacactgctaacctatttcatgtttaaaatcttctctgccgaggctcaagttaggtttcccaatggaagaagaatacagctcctgggaattagggcaaaatggcttgttaaatgaatgaagacagaggctgaaatacaaatattttgtgaagtgttcatattttatcagccaaaatgagctatagcaaatcatcacatgtctaaaaaatgtagagaatactgggagctgctcgttttacatcgagtcgaccttctgttgctttaatgacctgatctgaaataacctggcaggctcagcatcacccccaaggtccgtgtcagcaaagggacccactgtgtccatcactgacatgacgcacgcgcctggctgccactcaccagcagggggcactgcgccggggcctttctgtaggcaaaaccactcaaaagctaaggattgagaaacatgtattccgggagacagaaaaatgtgcgtcagtgtcaccatctcagacaaactcattgccacaccatcgacaggacatcttcatgtgtgtcttcataacaatatccactgtagggtgttctgaggcccagagcctatcccagaattacaaataaaatagtagtgaagccaaaaataccaagtctatctgaaaccctttcagtgagcatgatttttattttattttatattttgagatagggtctctctcggtcactcagccgggagtgcagtgacacaatgataactcactgcagacttgaattcccgggactcaagtggtcctcccacctcagcctcctcagtagctaggactatggcatgcaccaccatgctcagctgaatttttttttattttttgtagagacaggttctcactttgttgcctatgctggtctggaactcctggcctcaagcaatcctcccacctcggcctcccaaagtgctgggattacaggtatgagtcaccgctcctggtcaacatctacattttatatttggggaaagtggggcccataaattatgtattttgtgatatatgagagacaaaataagagttttaattgcatttaatatttaaaagactgtaatggctgacccataaaacaggattttatccatgatttcctctctagtgaatcattcctatcagcacaaatttttcccatgttaaaaaaaaaataagttttggctaggtgcagtggctcatgcctgtaatcccagcagtttgggaggccaaggtaggaggatcacctgaggccaagacttgaagacttatctgagcaacataatgagactgctgtctctaccaaaaaaaaaaaaaaaattaaaaattagctggacatggtggcatgcacctgtagtcccagctactcgggaggctaaagggggaggaccccttgagcccaggagtttgaggctgcaatgagtggtgattgcaccacatcactccactccactccactccctgtctccaaaaaaagaaaaaaaaaaaaaaaaagttttggcctttctttcccttctcattactgcccccatttctctctttccctttatagggaagttgtgtggtaaacacactctacgatgagtattcacatccttgaataaactcctccccttgaaggaggacatagtttgcttgagtgtgagcaaagctgtgacttgcttctaaccaactgtatacagcaaaatcaataggatgtcactcccaagattacatactattaagactccatcttgctatcaaactcactctaacactctctctcaagatagttctgaagaaataagcagccaggataggaggccaatctatcaagaagctaaagacaacctctaagagctgaaagccaccaagaagccaggactctaagtcccacaaccacaaggaaatgagttctatcaccaacctgagtgagcttgaaagcaccttcttccccagttgagcctccagattagaacacagtcaagctaatcccttgatggcagccctgtgagaccctaagaagaggacccagttaatctgtgcccagactcttgtgagataataaatgcatgttttcttttaagtcactaagtttgtggtaattttttatgcagctgtgttcaaggatttcccaacaccactctcagcttcaatgatcactagaaggactcgcagaattcagcagagccattacactcacagttacagtttatcacagtgagcagatacagattaaaatcatcaatgaaaaaagatgcatagggaagaatcaggagagaccaggcatcagtttccagttgttctctcaccatggagtcatgtagacagcacttaattctcccagcaatgatgaatgacagctcccacagagtattaccaaacagggaaactcactgaagcctttctgtccagggcttttattgaaggttggttacctaggcatggctgactgcctgcatggctgactcgagtctccagcacctccagagattgagatcatactgggtagtacaaggcccccgccatcaatcacattgttaacatgaactatcttacatggcccaaggcctcagataaacaaagacattgttaacagacaggagattccaggagattagaggttgtctcccagtagccaggaaaggaccaaacctttctttggaatgtggaagaatcagactacctaaacctgctgaatcctttatagcacagcagaaatagataactaataaagattctggtacctagaagtagggtgctgctgtagaagtggctttggaataaggtaatgggtggaggctggaagaattgtgatgagcatcatagaaaaagtataaattgctttaaacaagccattaatagaaatctggacttggagaatggtaccggtgatagctcagaaggaagtgaggaccatgttattagaaaatgaaggaaggaaaggctgggtgcagtggctcatgactgtaatcccagtactttgggaggccaaggtgagtggatcacttgaggtcagaagttcgagaccagcctgggcaaaatgatgaaaccccatctctaccaagaagaagaagaagaagaagaagaagaagaagaagaagaagaagaaggagaaggagaaggagaaggagaaggagaaggagaaggagaggaggaggaggaggaggaggaggaggaggaagaggaagaggaagaggaagaagaagaagaagaagaagaggaaagaaaaaatacaaaaattagctaggcatggtggcgggcatctataatcccagctactcaggaggctgagccaaaagaatcatatgaacctgggaggtggaggttgcagtgagccaaaatcatgccactgcactccagcctgagtgatggagtgaaactctgtcaggaaagaaaaagacagaagaaagaaaaagaaagaaagaaggagaaagaaaagaaaaagagagaaagaaagaaaaagaaagaaagaaagaaagaaagaaagaaagaaagaaagaggaagagagggagagagggaaggagggaggaaggaaggaagaaagaaaaaggaaaggaagggaaggaaagaaggaaggaagagagagagagaagaaggaaggaacagggacagtaaataaggtagaaatcaggagacattcatgggactggggccaatcagacatcaacatggtggattagcatccaagatggagtaatgtttgtctccacaggaagagacgtgaatcactggggattagactgtggtggacagactgtaagatcatcctttataatcctcaaattctagtattaatgcacttttagaatccccttcccttgagtatgggcaggatccataactcgccttaaccaatagaacaggacaaaggtgatgtgacatcattcccagtagcatgttacattatgctatggtaccatgttacgttaaataagattccatcttgctagcagactcacccttggaactctctcccttgctagccatgaggactatgttagagaatcgttaagtttcaagaaactgcaggtgtcttctactggctgaggatgcctcacagtgtccagatgtttagtcaaactttgttctggttgtttctatgaaggtgttttgtgtgagattaacatttaaatcagtggactttgagcaaagcagattgccctccataatgtgagtgggcctcatccaatcagtagaaggcctaaatagaacaaaaatactgacctcccccaagcaagaaggaattctgcagcagatgccttgacttgaattgcagtgttagctccctctagggcaggggtgtccaatcttttggtttccctgggacacattgaaagaacaattgtcttgggccacatataaaatacacggatgctaatgacaactgatgagacaaaaataaatatcacaaaaaaactcataatgttttaagaaagtttatgaatttgtgttgggcctcattcgaagccatcctgggtcacatgccccatgggctgtggattggacaagcttgctctagggtcactgtcctgatgatctttggatctgaactacagcactaactcttctctgggtctccatgctactggcccaccctgcaatttttggacttgtcagcctctgtaatcatgtgagctaattccttaaaataaatttctctctctctctctctctctttctatatatatatatatatatatatatatatatatatatatatatacacacacacacacacacatatacaaatatatacatatacatacacacacatgtacacacacacatatatatacacatacacacacacacgcatcctattgattctgtttctctggagaacctgagtagtagagtaagggaacaatgaattgaatgattgtgaatttcccatcaggtaccatagaggccagagggcagtggaaaaacatttctaaactgctgaaaaaggccagggatagtggctcacgcctgtaatcccagcactttgggaggccgaggtgggcggatcacttgaggccagtagtttgagactggcctgggcaacatggcaaaaccccatctctactaaaaatacataaattagccgggcatggtggtgcatgcctgtaatcccagctactcaggaggctgaggcacaagaattgcttgaactcaggaggtagaggttgcagtgagctgagatcgtgccattgcactccagcctgggcaacagagtgagactctgtctcaaaaaaaaaaagtgctgaaagaaaagaactgttaacatagaatttcatatccaaataaaatgcccttcactaatgaaggtacaataaaaacattctcggccgggcgcggtgactcaaagcctgtaatcccagcactttgggaggccgaggcgggtggatcacgaggtcaggagatcgagaccatcctggctaacacggtgaaaccccgtctctactaaaaatacaaaaaattagccgggcgcggtggcgggcgcctgtagtcccagctactcgtaaggctgaggcaggagaatggtgtgaacccgggaggcggagcttgcagtgagccgagatagcgccactgcactcaggcctgggcaaaagagcgagactccgtctcaaaaaaaaaaaaaaaaaattctcagatgaaggaaaatgaagagaatttgtcaccagcaaacctgctccaaagaaatgctgaaataaattctggcagaagggaaatcaaaccagtgtgtaacttggagcttgaggaatgaggaagagcaacataaatggaaaatatctggataaatatagtaggttatttttctccctttaagtttcaaaaaaatatgtgtggtggctagaagcaaaaattataacataatctggtggggttttaaaattgtatgtagatacaatgcacacggcaactacaacataaatgagggcaaggggtcctatctgggaataaggtttctctgtcctccacactgaattggtagaaggtgttatcagtgaaaacggcagagtgagaacatccaaagagcctctcctctatagaagcagtgagaacatgggtgaaattttttttttagacggagtctcggtctgtcacccaggctggaatgcagtggcgcgatctcggctcactgcaagctccgcctcccgggttcacgccattctcctgcctctgcctcacgagtagctgggactacaggcgcccgccaccacgcccggctttttttttttttttggatttttagtagacacggggtttcaccgtggtctcgatctcctgaccttgtgatccgcccgcctcggcctcccaaagtgctgtgatcacaggcatgagccaccgcgcccggcccatgggtgaaattttttagaatctactttttcaggactgtggagacttgctgagcatttattttagaaaaatggctgaatctcagagagaacagtgagttttgtggtgatttaatttgccctattctcatccccctgccctcactccatggtaaccttgaaaaccagcagattgctatcatggtgaaaaccagcacactggcagtcactggagggggcaaatggaattggagctccttcaaagtccccttctcagagaattttcattatttgacctatctctggctccttaaaagactccagtcataggctatctttatttgacttgactcagatcccagggcaaatagtcctcttgctatgtcaccaggctggtctcgaactcccaggctcaagtgattctcctgcctcagcttcccaaagtgctggaattacaggcatgagccaccatgcctggccagaatttgcatcttgaactggtttagatagggatcaaatgcctttgctatctattgagatgatcaaatggttttgctcctttagtgtgtctatatgatgaagtacactgattggttttcgaatggtaaactaacttcgtactcctggcgtaaattctacttgatcagatgcattggactaaaggctgttttttccctcgtgcttcttgtactccattaagcctcatttcttctatttctgattcgctttttccacccacataattgggacacgtcaaaattaagtgagttatgcaaagtacagtaaacatgataaagtattttggggattaaacttatgcttttacaaaaagaaataatttaggtaaataatacaaggattatatgttatcatactttataagatactgatgatttcttaaagatatttgagaactacaccctttactgccacagccaaataagtggcacttgtcaagtaaactgagatatttgaagcagactctgactacagcaccccacaaaatacaaaactatgacccacattcactctaaagctatttctgggccagacgtggtggctcacccctataatcccagcactttgggaggccaaggtgggtggatcatttgaggtcagaagttcaagaccagcctggccaacatggtgaaacccgtctccactaaaaatacaaaaattagccaggcatggtggcgtgcgcctgtaatctcagctatttgggaggctgagggaggagaatagcttgaatccaggaggcagaggttgcagtgagctgagatcatgccactgcactccagcctgggtgactccaggaaggaaggaaagaaggaagggagggagggagggagggaaggggggaaggagggaaagaaagaaataaagcaacaaagcaagaaaagaaaagaaagaaagaaaaaagaaagaaagaaagaggatggaaggaaggagacggagggaggagaagggaagggaggggaagaagggaggggaacggaaaggggaaagaaagggaagggaaggggaagagaggaaggagctacttctgaactcaagcccagaacaaaatctgtgtaccaggtgattctagatcatgatgctactaaaagtatcactgttaattaataaaacaaaactaaaataaaataaagttataaatgtgtaagagggaaaagggtggaaacatgaagaaagaagcaggttgcttgttttaaatatgaatatgcagcaccaaatcaggatttttagtagtaaaacactgcaacatgatcaccccgaaacaaaacacacatgaaaattaatgtgccttatcagattctgaaagtcctatttgcttaccattttcctcataagaaagctgagaactcactgctcactgatgtgactttctgctctgcgcacacctaaggcatgaacaagagccaagaatctattcctttcgaataagaggagtctcgttcctatagaacatgggtcttgaaagggctctttgaagccctaaccaaaaagtacacaaagatggaaagagtctaggctggggaataggcaaaaataagaaacaagtaaaatgaaagtgatgacggcacagttttgtaatctcctccaatcccctcataaaacagggagatcaattaggatagcaaaagataaaacccacagagaatgccatcaaccaaatgcatgcagtcaaccagcatatgaaaagaagctcaacatcactgatcactagagaaatgcaaatcaaaatcacaatgagataccatctcacaccagtcagaatggctgttaccaaaaggtcaaaaaataacaggtgctggtgaggttgtagcgaaaagggaacacttatacgctgttggtgggagtgtaaattagttcaaccattgtagaaagcagtgggacaattcctcaaagacgtaaaaacagaactaccattcaacccagcaatcccattgctgggtatacacccaaatgaatataaatcattctaccttaaagacacatgcatgtgtacattcactgaagcactagttacaatagcacaggcatggaatcaatgtaggtgaccatcaacaacagactggataaagaaaatgtggtacatatacaccatggaatactatgcagccatcaaaaagaacgagggccaggtgtggtggctcatgcctgtaatcccagcattttgggagtccaaggtgggcagattacttcaggtcaggaatttgagactagcctgcccaacatggcaaaaccccatctttactgaaaatacaaaaattagctgaacgtggtggcacatgcctgtagtcccagctacttgggaggctgaggcaggagactggcttgaaaccaggaggcggaagttgcagtgagccaatatcgcaccactgcactccagccttggtgacagagtgagatcctgactcaaaaaacaacaacaaaaatgagatcaggtcctttgtgggaaaatggctggaactggaggccattagccttggcaaactaatgcaggaacagaaaatcaaataatgtatgttctcactaataagtggaatgagaacacatggacagatagaggggaacaacacacactggggggcctgcttgagggtggagggtggaaggagggagaggaccagaaaaaataactgttgggtgctagtatctgggtcacaaaataatctgtacaacaaacccccatgacacaagtttacctatataacacacctgcacatgtacccctgaacttagaagttttaaaaaacacacatatataaaactataatcacacacacacacacacacacacacacaaaccacagacagcagtcagacccacagggaatgacatcaggccaggggcagagggaaatgagggtcttaagtgctggggagctaagactgccaacaggtggtcagccccacaggaggggctcccacccagacgcagatctaggcacagcaggcaaaactgggcagggctttgctgcaaaaaggcagttgaccatcaagatgctcaggaagcaggtgcagtggcccacacctgtaatcccagcactttgggaagctgcggtaggaggattgcttgaggccaggtgttcgagaccagcctgggcaacatagtgaaacacctatctgcaaaaaaatttcaaaaaatcagcttattctggcctgtagtcccagctactcagaaggctgaggcaggaggatcacttgagcccaggagttcgaggtttcagcaagcttgacggcaccactgcactccagcctgggcaacagagtgagaccctgtctcaaaaaaaaaagactctcagaagcacccagtggcctccctccccttctggagttggagagctcacactgaggagaaatcgttgcaaggagaccccaacttgatcagggctgggcacctgggcataaaaaaaaaaatttagatgctagtcagagaggggaccagagaaagcaaatagcagaaagcactgaagagatgactgcacatattttctaagactttctgataaaatgggaaatgagagaaagacactctggcccatcctcaatatagaaatttccttctaaaaatacaacttcaacaacagaaaaagattatggtcaatcctcactcaaaaatagaataaagaaagaaaaataatccaaataacatatatttagaggataatattcaccagaaaaaaataaaactacggggtatatgaaaacattaagctaatatttcaaaatgaattacagaaaattaagaaaataggagaagctatgaaagaaaggcataaacacaaactagaaaactcagaaatgagatggccagacaataggcagatgtgagaacagtttacagagctcagaaacaattggcagaaacaagaaaaaaaggaagaaaataaaacagaaatgaagaaaaggatagaaagcattaaaataaaaatgataaaagtaaaaaataagaggccaggcataggggctcccacccatagtcccagcacttcgggaggccgaggcaggaggattgcttgagcccaggagttccagaacagcctgagacacgtagcaataccccgtctctacaaaacttaaacaaaattagccaggtgtggtggctcatgcctgcggtctcagctactcggggaggctgaggcaggagaatcacttgagccagggaattcaaggctgcagtgagccgtgttcacaccactgcattccagcctgggtcccagagaaagatcctgtctcaagagaaaaataaaaaaatgtaaacaaaagacagccaatgtatgtacagaaaaaattagagccttcatctttgccaatcaacatcctggcacattggtttgttgtttccaactttttattcccaacagccattctgaatggttttttggtttttggtttttggtttttgtttgttggagacagagtcttgctctgtcacccaggctggagtgcaatggcatgatctcagctcactgcaacctccgcctcctgggttcaagtgattctcctgcctcagcctcccgagtacctgggattacaggtgtgtgccaccatgcctggctaatttttatatttttggtagagacagggttttgccatgctggccaggctgctctccaactcctgacctcaggtgatccacccacctcggcctcccaaagtgctgggattataggtgtgagccaccgcaccggccctgaatggtttttgaatgatctcacacagagtatatgatttggacactagtgcagtagagtcttacaatgaaacagagtatagggttaccaaaggaaagaaggcagaagatggaatttgaggtaatcagcatgagagaaagacatatctgcaactaacctgagtacagctgaaatcatccctttcctatggagtgccttagtctatgtcttaactgcaaattgtaggagatgatcatttcaagaaggcaaaggtttgtcatctgtgtttttaatcccaagatggtgcctaccatcagtgatgacctgctgcggtatcctcattccagtaatcactccctcagcagtgcgattgtgatgaccgaaaggaagcctctgctattgtttctaccaccagctttatcaaaaccaagacatggaccaggggcagtggctcacacctgtaatcccagctactcaggaggctgaggcacaagaatcgcctgaatccagggggtggagcttgcagtgagccgagattgtgccagtgcactccagtctgggtgacagagtcagactctgtctcaaaaatgaaaaaaaagtaagtcatggtcttcataatctacagagactcctcacttgcgtatgttgcagggaacactccttgcagatcagaaaaactagactgacatagctcatttttggaaactgcccttgagaatgtcatcgaggccaggagtggtggctcacacctgtaattccagcactttgggaggccaaggagggtggatcacctgaggtcaggagtttgagaccagcctggccaacatgtgaaaccccatctctactaaaaatacaaaatttagcagggcgtagtggcgcatacctacagtcccagctactcaggaggctgaggcaggagaattgcttggacccaggaggcagaggctgcagtgagctgagactgtgcactccagcctgggtaacagagtgagactccgcctcaaaaaaaaaaagtcatcgaagtgaattttaactaggcacgatgattgttttcatggttacccttggactaaattttaggagctggaatgagtgagacgtgattgaacagagaggccaggatggtggcattaaaaggggttcatctcagttcttcataagtaggaagtacatatatttataattttcacttatcacagggtaaatttaaaattgattcattaaaagatgatctttttcaagaattcaaaggacatagaattttgtaacatgcaatattttttaattacttgtctttttttctttctaattctaccccccaagtctatttttttataaggtcattgatacataaatagtttcagggaggatgatatattatctacagactttctatgtagtgaacctgcctacatataaatgtcaattcatccaactactgtgttggaataatttctgtggattgaacctgctagggcaaagtaaatgcaaaatctgcattttgaggctgggcgcagtggctcatgcctgcaatcccagcactttgggagtctgaggcgggcagatcacctgaggtgaggcgggcagatcacctgaggtcaggagttcaagaccagcctggccaacatgatgaaacccccgtctctactaaaaatacaaaaattatccaggcatagtggcaggtgcctgtggtcccagctactcgggaggctgaggcaggaaaatcaatggaaccctggaggcggaggttgcagtgagccgatatcacaccactgcactccagcctgggtgacagagggagactctgtctcaaaaaaaaaaaaaaatttcctataacataactcgagtgagaattctccatttcctaaaactgtacaaacatcagatatcagtatttgtaatcactgataatgtaatattacaaagaaatttatttttcttctattaatgttaagctacatcatcctggtgtagatttattagtcatttgcgttatttcattttcctctgttccttttattttcactttccttgtaatattagtctctttgttactgatttctaagagttcattcatgtttaatgatgttaacattttgtcaaacattgcaaatgagataccttgttttttcctgtttattttaccgtggtggttaattttttggttgtacagaaattatgtattgaaatataatcaagtgcggttttaaaaagaaaaaaaaggcaagaaaaggaacagaaaaaatctttttgtttttttgagacaggattttgctctgttgctcaaactggagtgcagtgcaatcaaggctcattgtagcctcaaactcctgggctcaaacaatcatctcatctcagcctcccaggtagctgggaccataggcacatgccatcaggcccagctaatttttgtgtttttcatagaaatgggatttcaccatgttacccagtctggtctcgaattcctgggctcaagtaatctgtccaccgtagcttcccaaattgctgggattacaggcgtaagccaccactcctggcctgaaaatactttaaaaaaaaaaccgtaattcaaaaatctcccctgaaattaaaaataagaaaaaaaagacttgaatcttcatacttacagggcacactacattcctgggaaaatcagttcagcatggccaactttgagacatattttagtaaaatgatggaactttaaagaaaaaatcctttggacattcgggcaaaaagacaaagtgactttttaagaagaaggaaatccgcttggcatcaaacttttcaacagcaaccctcaaagccagaagacacgggagtagcctatttaagatcctcaaggaaagaaaatgtccactgaagatcttatcctgaataactctcatataaattcatggactaactctatgagcacacaagacaccagataagctcttccttcttcctctttccccatgccttcctgagagaattcagtcctaactcagccatcaggtatgggagagcaaggtagttgcctgcacagggggagggcaggagcagcggtgagggccaaaaatgaggtgggatagctcaagtagggtgaggaagacgtttgcagaggagggcagcctagcagaggcttagcaggaagagaaaggcatctacaaaaggtggcaacctggcatgggtgcgagcaaaaaggagtgaaaaaagtgtccacacccagggcagcctgacccaggaagtcagagcttgaatagaaatagaaagacagtctggttgggatgtgaaaacccacacaaaagaaggaggcatcagtgtgtgtgaagggaagagtagggcatcagaggccaagtaggctgagagtgtgcagcagacaacctggcccagggagtagacgcccaactggggtgagaagggcagccacgaagggtgcatcctggcaccgagagtgatattccacgcagagtgagaggggcatctatgcaaggcatgaaggtggcagtaaagatgggagatttgttacatacagggaggttgtgcaagtaagtaaatacattaaagataatagggactgggtttctcactgtcagagaaaagggatacaaacatggaaaaggagaaaactacagtgaactctgtggtattgaactggaattggaggtatagtgtgactcatagagagaaaaaagagtagagtagattggattggattagattgaattggattgactagattgatagatggatagatggaggggagataatggatggatggatggatcaagcaatcaatggaatcaatgaatcaatcaatcgagtgatggatggataaatggatgggtggatggataagaagaaggaaggaagaaaggaaagaagaaagggtagatggatgggtgatagatggatggatggatggatggatgggtggtggatgaatgggtggatgatgaatgaaaaaatggatggatggatgcatggatgcatgggtaaatgggtagatgaatagatggatggatgatgaatgaaaggatgggtggatggacggatgatgaaaggttgcatggatggatggatgggtagatggatggatagatgggagatggaatgatggatggatgaattgatggatggatggatgatggatggatgagtggatgggtgggtagatggatggatggatgaatgatggatggatggatagaaggatggatggatggatagaaggatggatgggtggatggatgggtagatggatggatgatggatgaaaggatggatggatggatgggtaggtatatggataaatggatgatggatggaaggatggatggatggaaggatggatagatgataaaaaacgcaaatgtgtaaatgtgtggtatatgacatacatatatatcccttagcctgtttacagagtgtgcctgggaacaactacctgacagtattgatgagcacacctagaatccttagatcttagtttctaagtatcatttcacatgagaagaaatcagggctccttgactgagtccaggaaaatgattcagtccaggcctaggacaggtgcaagatatgcctagaatatcttgttgttcagaaagtaaggaaattctcaatgaatgatgggaacatgtcaaaatgacacaagaatgagctcaaagaggatcccactggcctaaatctgagacagttcgaatatcaaaataaataaataataataatggagtataattgatccaataaaataaaatccttaagtccgatataaatacatgaatgaataaattgagtttgatcagcaacagggtatttacaaagtttttgtatgtttgtttgtttgtgtgtttgtttttgagacgaattctcactctgtcacccaggctggagcacagtgccatgatctcagctcaccgcaacctctgcctcccaggttcaagtgattctcctgcctcagcctcccatgtagctgggattacaggcatgcgccaccatgcccaactaattttgtatttttaatagagatggggtttctccatgttggtctggtctcgaagtctgacctcaggtgatccacccgccttgccctcccaaagtgctgggtgtgagccaccgcgcccagccctttacactgtttaaagtacctccacatggttggatggatgatggaaggatgcacggatggatggatgggtggatggatggatagataggggatgctaattaagaggcaaagagtaactttacagcagaaaagtctggcaaatgccactttattaagtgatcacagcgaacaggacaaattaaaattgtgtgacagatacatggagaatgcaacatccacctttgcaatatccctccccaaaatgcacaacctgagtctaatcataagatgtcatcagatgaacccaacttgaaggacattctacaaattaactggtccctaatcttcaaaagtgtcgaagtcatcaaagtgaaggaatcatcctgtccctttggctcctccggtctggaggaggaggagtcagtctgggggaggtatcttccaaactggaagagctaaagggacatgaccactaatgtctcttagcaatgcatgatcctggctgaatccttttgctataacagacattatgaaaacaataggtgaaccttgagttgaggctgaggattaaatgttgctatggactgaatgctgatgtgctcccaaaatgcatatattgaagccccaacccctaatgtaatggtattattaggagttggagtcttgggaggtgattaggtttagatgaggtcatcaggatggggtccttatgatgggaccagtacccttatagaagagtatagaagacagcaggagtttttgtgccctcttcacacccaacccttcccaccagagccgtgtgaggatacagcaagacaactatctgcaagccaggaagacagccctcaccaggaactggatcacttggcactttgatcttgtactttctgccttcagaacggtgagaaataaatatctgctgtttaagccatccagtcaatggtatttcattacggcagcctaatctgactaagacacatgttagtaatggatccctgtaatcttcctaagtttttctaataataatgaggttatgttggtgattgttttcgtaggaaatacacactaaagtatttggggtgacaaagcatccggcaacttatcctcaaatgagttggagagaaaaaatttctttcctatttcttttcttttccttttttttttttttttttttttgcgggggtggtcgggacagagtcctgctctatcacccaggctggagtgcaatggcacaatcttggctcactgcaacctccgcctcccaggttcaagtgattctcctgcctcagcctcctgaatagctaggactacaggcgcccaccaccacgcccggctaatttttgtatttttagtagagatggggtttcaccatgttggccaggctggtctcgaactcctgacctcaggtgatccacccacctcagtctcccaaagtgctgggattatgcgcatgagccaccatgcctggtcgaaaaaatttctttgggtcctccaacttttccacagattttttattgaagattaaaaagacagatgttaaagtaaacaaaaaagattcaggaactattgttgccatgagcctttaatgaaggcatctactggagaacaaacttcagaatactaagaaatgattaggcaggttccagttttggcaaagggataatggtaaatactgagtatatttagaactaggacaaaatgatggggtaggggtgccaggacaatatataacggtgatgtgtttgatagtgtagacaaaatgcaaccatcaaaaatagtgggggagaatgtatagaataaactcaagctgggcgtggtggcacacgcctgtagtcccagctacttgagaggctgaggtgggaggaccacttgagcccaggaggtggaggctgcagtgagccgtaatggtgccactgcactccagcctgggcaacagagtaagaccctaactctaataataacagtagtaacagtaattaacttgttgattgtcttattgctgttaactgagagtaaactaattttattttaagttagatgctggataaaagggaaaaaaaagagagaggaagaattacaagctatttaaaacattgctcatgatagggaagccaacacagtaccaaaataggtagggaggtggtatttaggttattatgtaaaggtattactataaagataaccattaggagacaaaactccaagcctttctaaacaccaaagggaatatcaagagagacaaagacagagaaagaaagagagagcaagagagagaaaaccaaaacaaagacactacagagaaactaagtgcagatgttgctcctcttaggatggggttacatcctgataagcccattcattgtaagttgaaactgtcgtaagccagaaatgcatttaacgcatctaacctactgaacaacataacagcctagctgaccttaaacacggtcagacacttccattagcctacaattgggcaaaatcatctaaaaaggctgttttataataaagtaagtgctgaatatctcatagaagttattgaacattgtactgcaggtgaaaaaatagattggttgtacaagtactcaaagtatggcttctactgaacgaagatcacttttgcatcatcgtaaagtcaaaaaatttaagttgatccaatgtacgccaaggaccttctgaatacaaagaaaagggtcactgcactcaggccaccacctgtctcaagcgagacaggacaacaaaaatcactgctcatgttcttccaaagcaccaccccaagtgtgccagacacaccaccaaagccaggtgccctgggaaatagcccatgtgacacatggcaatgggaaaatgacaaaagtccacgtctcttttcaggaactagagaaagactcatcttcaaaatcaaaacgtcgtgaaagtttggtaagagttttctacacagctatgatctattttaggaacaaacaccttttcaagagaatgctttccagacaaagaagctgatagaaagggcggaaatcctcccaggataggatcacaaaggacccatataaaaaattcttaaagaaaaatgacgttaccttttctctgccagaaggatccatgctctgaggcttgtaacaatgtccgggtcaccagagtatatgttcacagtagtcttggcagacaaggaagttgcaaattatttatctatgaaaccaaaaaataatattcctaaaaatactggttacactgctaattatttaagtctatttagcaaacccattgctctttatattttctatttaggtactaacatcaaccatttacacacagctggaaatctttttgaagaattaattatctaagagaggaaaaaaggaaaatagtttcctcccacatttaagcaactagtatcttctcttcccgtctggtgaccttgagggacagaagtttccaataatctctgcaagtggccattccaggcactgacaggctcatgtgctgtgatccagtgggacatcacagaagcaaaaggcttggcccttcccgttcacacctgtcttttgtcctagatattccagataaatacaaacaggacaagatcagcgaaagacccatcaggagattacatcagtgctacaggatggctagataaatcagctttgggagtctggggccctggatgggagtccaacatgtcctaagtgtgaggccttcactggccttcactctgtctcagattcctgacctcgagaccagcttcacggtcatgcaacttgcacagtcacacacggcccgtcacttagaagtacccatctatggtggctcactcctgtaatcccagcactttgggaggctgaggtgggtggatcacctgaggtcaggagttcaagatcagcctggccaacatggtgaaaccccgtttctactaaaaacacaaaaataaattagccgggcatggtggcatgtctgtaatcccagctattcaggaggctgaggcaggagaatcgcttgaacttgcgaggcagaggttgcagtgagccaagattgtgccattgcactccagttcaggcaacaagagcgaaactctgtctcaaaaaaaaaaaaaagtacccatctaacctcatcttttcagtcaggtaatccagtggaactctgagtctatcaccaacagccattgccctcaactccttccctagtcccattaaactatcatcacatcctccttacaccagtcctgattttaagtcaacacaattagcattgatctaacacatgccctttgccaagccctggagtaaatacagaggatacaaaactaagcaagacaatgttagctgagtgcagtggctcacatctgtaatccacacattttgggaggtcaagatgacaggatcaccggagcccaggagttcaaaaccagcctgggcaacatagcaagacccatctctacaaaaaaattaaaaactaggggtgacaaaaaattttttgtcacaatgtcctgcaattgtgacatgcgcctgcaatcccagctacttagaagtccaggcaggaggatcatttgggtcctgaaggtcaaggctgcagtgagctgtgatcacaccactgtgctccagcctagacagcagggcagtaccttgtctctaaaaataaaaaataaaataaaatttaaaagacatttctcctgcctatgactagctcaggaagaaagacagacatgaaaaacaaatgggccgggtgtggtagctcacacctgtaatcccagcacttttggaggccgaggcagacagatcatgagctcaggagttcaagtccagcctgggcaacacagtgaaaccccatctctacaaaaaacacaaaaattagccaggtgtggtggcatgcaccttgtagtcccagctacttgggaggctgaagtggcaggatcacttgagcctgggagttccaggctgcagtgagccgagattgcaccactgcaatccagcctgggtgacaaagtgagaccctgtctcaaaaataaataaataaaagcaaatgactatcacatactgcagtaaccacctaaacagacatgacttaaagatattgatggcacagaggaggaaagggccaactctgctagagtgattcaaacaagcttcagaccgatagaaatggtattagccgggttattcaagagtgattataagtttgctaggcagttggggtggggtggcaggggaaaagactagcataggaaaaaccaagaaggcatgaaagggcatgtcgaggccagactcagtgcttacacctataaacgcagcactttgggaggccgaggcgggcagatcacctgaagtcaggagttcgaggccagcctggccaacatggcaaaaccccatcactacccaaaatacaaaaattagccgggcatgatggtgcacccctggagttccagctactcaggagactgaagcaagagaattgcttgaacctgggaggagcaggctgcagtgaactgagatcacgccactgcactccagcctgggcgacggagtgagactctgtttcaaaaaaacagtaaaggaaagaaaaagcatgtggagattgtcaagctggtcaggacaaacaaagcttgtgaatggtgcacatgggaaggatctgagagagtaggccctgaccacgagacttgggttctgtgctactgagcttagacttcattcaaaggcagcagcagggaagaggttccctccagatttcagttttaaaatgatcgctctgccaggcgaggtggctcacgtctgtattcccagcactttgggaggccgaggcaagtggattacctgaggtcgggagtttgagaccagcctggccaatatggtgaaaccccatctttactaaatatataaaaaaattagccaggcgtgttggcatgctccagtagtcccagctactcaagaggctgaggcaggagaatcacttgaatccaggaggtggaggttgcagtgagccaagattgtgccaccacactccagcctaggttacagacagagagactccatctcaaagaaaaaaaatataataaataaataaacaataaaaacaaaaatatcactcttgattggatggagaagagcaagaccagagagatcagtcaggagattacaacagtgctgcagagtggctagacaagtcggccctgggggtctgcagccctgaattgaacgcaggtccatcacatccttagtgtgagggcttccgaggtctgcaattcctgaccttggaaacagcttcatggacgcgtgacctgcacggtcacacacagcctggcacttcaaagggctctgttgtccgtcttaaaattcttaacaacttttaaacaagaggacccgcattttcattttatagtaggccctaaaaattatgtagctgggccaggcgcagtggctcatgcttgtaatcccagcactttgggagctgaggtaagaggattgcttgagcataggagttcaagaccagcctgagcaacatagtgagactccatctccacaaaaattaaacaaaattagctggctatggtggcgagaacctgtagtcacagctacccaggaggctgaggtgagagtatcgcttgagcccaggagacagaggttacagtgagccaagatcgtaccactgcactctagcctgggtgatgcagtgagaccctgtctcaaaaaaaaaaaaaaaagaaagaaaagaaaaggggggatgggggcaaataagtaagttgtagaattattactaaaggaaacaagaggttgaactatttgaaatcaccatttctgtagtcaaaaattgccaagtatcagcaatttcatatggctcaactcaacacttcttcaaaatgtaggtagtcattcaaaagacaacattatccaaaaacatgacagtggcaaaaagaacattactcataaaaaaaaaaaaaaaggaagtaaatttaggaatcttaaaagggcatcgtttattactcttgtgatcagagaaaaatacataaatattaattttttaagtgcaataattccagaagaaagcaaacatatcactagaatggaacaagaaaagcaataaatgaacaaacatcctcgcagaaaccatagctgaagaacatatgtatgggtaaagaaacaaatactatagtaaaaatagttttatgtttgaattacaggcatattatggcacatgtgcaataagacaaaatgacaatttattaaaacatgaattctacttgataaaaaagcaaattagtgactgggtaattcctctatttattatttattgagctaataacaaatgcacaaagaaatgagacagaaggttttaaaacctattggagccctctttgtggaactgggccaatcaggatcttgcaggcagttctcactcatgatataaaaggccctctggagcattcagatgggcttttttaaaaatatacacagctgcttgacaccaggatgccacgatggggtaggttaaatggctaccaacagatacaaagcccccagcactttttaattccttaacctttttcattctaggtctaatgatacacttagaatggatggcagtggagggatgggttttgactccctcccccacctcaagaatattagcagatgcaggagacgacaattaaggtgtcaacataaggaaaatcaaaaataaaaagtaaccaaagagtttagatgatttgggtctatcctcagagctcaatcccgtctatcagaacatttgatgcagtgatttttcctttcttcttaaaatactgtctccctgcggctgctggctcaccatactcacctggttttatttccgttttcaaggacctctacctctctgttttccttgctgaatcctcttccccttcgcggcttctaactgttggagctcccccagggctcagtctgaagacctcttgtcatcccccaatacctggcggatttcatccggacctgtggctttacatgccacctctactctgagtaccgcgcatgtatctgtccagcccctcctggcaccctgagctccacacatgcttagcaagccacggatgctgcattttcatttgcatgtgtgatatggtttggatgtgtgtctcctccaaacctcatattgaaatgtgatccctcatgttggaggtggggctgggtgggaggtgcttgggtcgcgggggtggatccctcataaatggcttggtcctatccttgctgtaatgagtgagttctcactctattagttcacattgatgtgcagacacgcaggtgccaatggattgagctgattgtttaaaggagcctggcgcctcctcccctctctcttgctccctctcttgccatgtgacacatatgcttccccttctcttccaccatgaagcttcctgaggccccaccagaagccaagcagacgctgtgccatgcttgtacagcctgcagaactgtgagcccaagaaaccactttatcaattacctagtctcagatgttcctttatagcaacacaaaatggactaatataatgcctaataggtatttcaaattccatatgattaaaacaatgctcgatgctcccaatccacttctccagtcttccccgttcactgatgagacttaacactgggagccatccatcacagcccatctccaattcatcaacaagctctatgacctctaccttcaaagcgaatcctgaatcccaccatgtatcaccatctccacaaagatcatccccttccaggcacgactgtctctcacctggatctctacaatagcttcatgaccgtcacctgctccctacttaccaccccggggttccgagaaagcagccagagttttttctttttctgtgtttttttgttttgttttgttttgttttgtttttgagatggagtctcactctgtcatccaggttggagtacagtggcgcgatctggctcactggaacctctgtctccagggttcaagcaattatcctgcctcagcctcctgggtagctgggattacaggtgtgcaccaccacgcccggctaatttttgtatttttagtagagacggggtttcaccgtgttggccaggctggtctcaaactgctaacctcaggtgatgcacccgcctcagagcctaaagtgctcggattacaggcatgagtcactgcgcccggcatcctttttataatcagatcacatcatcattctcccacagaagccctgcaatggcctcccaccacccttggaacaaaccccactacttcaagacatggtagcataaattctcataattacatcagaggatgatccggcaatgccgagtaaacctgaagattagaacaccttctggcctcgctattctttatcccggtatctccctgagaaaaacgcttgcacagattctgtacagagatgtcactgcaaaaccacttatcagagtgaaaaggtataaaacactgattgttcctcagtagagacattgatacaaaaattaagtttgttccacatggtaaaatgctggcactagtcaaaagaaataaattagatctaagcatagtgtgctagagttaatgattcctgatgtttggccgctgacagcttccaagccacatcactggccctttcccttttgcccacacccaggcaagcctataagaaagtttgtgttctttatccctttgcatgggcagggaagtctaaaccatgcacacccctgcatggagccctccccaccccacttctaaccacactaaaaagcagagcgcctccacctcccaccctcactttttcactccaaaccaaatcgaagccttcaagaaatatttgtgatgttgactatgtgagcatagtcacgcaataaattgcattccatatccattggtaattgtgtgtcagcgtaggcaccctgacatccataaattccaggaggtggaggcagggggattgcctagcgtccagcaaggaatgctaaattcctaaataatacgtataccaggccaggtgaggtggctcacacctgtaatcccagcattttgggaggctgagccagggagaatgcttgatgccaaaagttcaagaccagccagggcaacagatcacgaccccatctctacagaaattttaaaaaattagccaggcatggtggcatgcacctatagtcccagctgttcaggaggttgaggtaggaggatggcttgagcccaggagttcaaggctgctgtgagccttgatcatgccactgcactccaacctgggcaacagagcaagatcctacctcgaaaaaaaaaatatgagagttagataagcctcaaaaacataatgttgattggaaaaaaagttgtgacaggatatcgtatggtatcgtttgtgtaataatctgttctagttctaggggttctgttttgctttaaagtctattttgtctgccattaatctttccttcagtgagaatttgttttatataaccttcatcatcattgtatattcaacctttgtgtatactgagactttagatgtgcaccttgtaattggctttttttttttttttttgagacggagtctggctgtcgcccaggctggagtgcagtagcgcgatctcggctcactgcaggctccgcccccggggttcacgccattctcctgcctcagcctcccgagtagctgggactacaggcgcccaccaccttgctcggctaattttttgtatttttagtagagacggggttccactgtgttagccaggatggtctcgatctgacctcgtgatccgcccgcctcggccttccaaagtgctgggattacaggcgtgagccaccgcgcccggcctgtaattggctaattttttaaatgatgtttagaacccaatcagatgattttgtttgtttgtttttgttttttgttttttgggttttttttttgtttttttttttgagacagggtgtcactctgtcacccaggctggagtgcagtggcaagatcttggctcactgcaacctctgcctcccgggttcaagtgattctcatgcctcagccacctgagtagctggcattacaggaacccacaaccacacccagctaatttttgtatttttagtagagacggggtttcaccatgttggccaggctggtctcgaactcctgacctcaagcgattgcccgcctcagcctcccaaggtgctgggattacaggcatgagccaccatgcctgactgatttttgtttttcaactggaatatttattcacccttaactataattttgtatatagatacatttattctcactattatcctatcgatgctttttctcttcatttttgccttttggggggatctatttcctatcttctcattccattcttttcctctactagttaggcaattttagactatgttctttaagcagtaacacaaggaatttcagcatccacaactaacttatccaatgttaacttcgactatatatttaccctcctcccaaacaacacaggacttcagaccactttaaccttaattactcctgtgtcagatgtataagctattgctgttatacatttttattttatttatttatatttttttgagacagagtctcactctgttgcccaggctggagtgcagtggtgcaatctcagctcactgcaacttctacctcccaggttcaagcgattctcctgcctcagcctcccaagtagctgggattacaggcacgtgctaccacacccaggtaattttgtatttttagtagagacagggtttcaccatgttggccaggctgatctcaaactcctgacctcaggtgatccgcccacctcagcctcccgaagtgttgaaattacattaaccccaaagcccttactgttgttgtacacaggcatgtttgtctgggtttacccacatatttattattttccttattcttcctttcttcttatacttcagacttacagctgggatcattttacttttatctaaaattcattcttagatcattgctgttcaatggaaatacaacatgagctcatgtgtaactttaagttttctggtagcaaaattttaaaaaattttaaagaaacaagtcaaatcaatttttttcattgtctaaggtaaatttattttactgttttaaaacaagcatgcatttccagtttccaatatgacaagggcaggcacttaaaatacacactcaaaattaattttgagtcaggcaaaattaattttaataaaacaaaaatatcccatgccaaaagcttgactcggtgtattttttcttaattaaaacaaaagtgtctatgaattatctgtgctcaaagattactctgtcattgctaacaaattagtatgcctcaatttccaagataaaacaagaaagtgttctcttgggaaactgtcatattaacagacagctgtgtgtgaacatagcaaatgctgaattctgaaggattcaggtcaaactgacagctgacttttacttatgctaatcaatttcatgtccactctctttataggcttttaagctgtactatttactgtactgtttattgttatatgcctcatgggcagtcctcagattttcagaggaaactttctaacatcagaactcaagcttttagcccattggtgagctagagctggctagcatcaatgtgcaacaactcattgttaaatatcaggaagtttgtgagttcaaccataggttgatgcgaaagtcattgcagtttctgctattgaaagtaatagcaaagactacaatgacttttgtagccacctaaaatggtttgaaattggccatggtgggagtatttcccccacggaaccagtgaacactaccagtcagggcttttttattgattacaccactgacacactattttaaatccctccttatttgcactgctggtttcccatttcaatttttttttttttttttgagacttgtttctattgcccaagctggagtgcagtagagtaatctcagctcactgcaacgcctgcctcctgggctcaagccaacctcccacctcagcctcccaagtagctgggactacaagcatgcaccaccacgcccagctaatttttgtattatttgtagagatagggtctcactatgtcacccaagctgtcctcaaaactcttgagctcaggcgatcctcccacctcggcctcccaaaatgctaggataacaggcatgagccaccgcacctggccagtttttctttttcaatattattttggctatttagatagctcacactttctgatttcaaaactactggaaccaaaaaagtgtggtactggcatcaggacagacgtacagaccaatataacagaatagagagccgagaaataaaccgtatatgatcaactgatttccaacaagggtgccaagaccattcaatggggaaaagacaatctttttaacaaatggtgctgagaaaactggatattcacatgcagagaatgaaattagacccttaccttacaccacatacaaaaattaactccaaatggatcaaagacctctatgtgtgagctacaactataaaacccttagaaaaaaacagggaccaaaaggaagaagcaacccacatgtccatccatagatgaaaggacaaacaacatgtggtctatacatgcaatggaatattatttgggcataaagaagaatcaagttctgatacgtattttcaacatagatgaaccttaaaaacatgctgaatgaaacagggcagacatacaaggacacatactgtataattccacttatttggaatatctagaataggcaaattcatagagacagaaaaacaggggctgtggtgatgggagaatggggcagtattgcttaataggtacagagattctattgaaggtgaaaaagatgtttggaaatagtggtgatggttgcacacattgcgaatgtaatttatgccactgaattgtacacttaaaaattgttaaagtagccaggcgcaatggctcacacctgtaatcccagcactttgggaggccgagctgggtggatcacctgaggtcaggagtttgagaccagcctgagcaacatggtgaaaccctgtctctactaaaaaaatacaaaaattagccaagtgtggtggcaggtgcctgtaattccagctactcgggcggctgaggcatgagaattgcttgaacccaggaggcaaaggttgcagtgaaccaaggttgcaccactgcactccagcctgggagacaaagcgagagtgtctccaaaaaaaaaattgttacagcaataaattttatgtttatatatatatatatcatatatgtatgtatatatattcatagaatctttatgtaaaagcttatcattctttattcttaatattatttatcttgatgctcaaattctcccagatctggccagtggcaactctgccaaactggttcctgcatcctttggacgtggctatatcatctttgaagacttccttattttcttctttccttttttgcagctatatgtatatatacacatacacacacacaatatatatatataatggttctttaggctgtacaggaggcatatataacattttatatatgtacatatatatacatacttagatacatatgtacaggaggcatatataatgttatatattatatatacatatatgtgtgtatatatataaaacattttatatatgtacatatatgtatatatacttagatacatatatatgtacaggaggcttatataatgttatatataatatataaatgtgtgtatgtgtgtattattgcaaaaaaggaaagaagagcataaggaagtcctcaaagacgatatggacatgtcaaaaggacacaggaaccagtttggtggagttgccactggccagatctgggagaatttgagcatcaaaataaataacatttataataaagaatgagaagcttttacataaagtaagattcgatgaatatatactgaatgatatggtttagatctgtgtccctgcccaaatctcatgtcgaattataatctccaatgtcagaggtagggcctggtgggaggtgattggatcaaggaggtgcatttcttatgaatggtttagtgccagccccttggtgctgttcttgtaatagtgagtgagctcttgttagatctggatgtttacaaatatagcacctcttctctcactctcgctctcttgctcctgccttggaagacatgcctgctcccccttcaccttctaccatgattgtaagtttcttgaggcctccccagaagcggaagatgccagcatcatgccccctgtacagcctgtagaaccatgagccaagtaaacctctttcctttataaattgcccagtctcaggtatttccctatagcaatgtgagaagggactaatacactaatataaataaataaacagcagaaatgtatctaatacacatagaaagaatgatggaattagaaagtcaccatgtgaggggcttaacagtaacaattgattcaggcaagagtgatcagcagcctaaaatgagtaaggaaaagtttgagtaacataatatttacagagcctctatgcactccccagaagatacttaataattagaaagaatgaagttacagtggggtgtgtatgtgcatgtgtgcgggtgcatgcaggcacatgtgtgtacacagtcatgcaccacatgcaatgtttcagtcaatgatagaccacatttttaccataactttgctatgtttagatatgcttagatacataaatacttaccattatgttacagttgcctgagcattcagtacagtgccatgctgtacaggtttagagccttggagccgtaggttataccacagagcctaggtgtggagtagtctctaccacctatgtttgtgtaagcccactctctgatgttctcacaaagacaaaatcttctaatgacagattcctcagaaggcatccctttcattaagagaagatatccctagccacctacccaccaaactatccctgcaaaaccctaacccccgagccttcggggagactgatttgagtgatagcttcagtctcccacgtggccaacctcgcattaattaatttaagcaacacatgactatatatccatcaagacagagaaagagaaaagataagacaaatgtattaggcaggcacagtggctcacacctgtaatcccagcactttgggaggctgaggcaggaagattgtatgtatgtatgtatgtatgtatgtatttatgtatgtatgtatgtatattttgagacagagtctcactctgtcgccccagtctggagggcagtggcacaatctcagctcactgcagcctctacttcccggtttcaagtgattctcccgcctcagcctcctgagtagctgggattacagatgtgtgccaccatgctcagctaatttttgtatttttagtagagatgggatttcactgtattgtccaggttggtctcgaattcctgacctcaagtgatcctcccacctcagcctcccaaagtgctgggattacaggcataagccaccatgcccagccattattattattattattaatattattttgagacagagtctcgctctgtctcccaggctggagtgcagtggtgcgatctcagctcactgcaacctccacctcctgggttccagtgattctcctgcctcagcctcccaagtagctgggattacaggtgtgcaccaccatgcccggctaattttggtatttttagtagagatgggatttcaccatgttgcctggattggtcttgaagtcctgacctcaagtgatcctcccacctcagcctcccaaagtgctgggattacaggcaacagccaccatgcccagccaaaaatgtatttaaaaaaaaattagttgggtttgatggcatacaccggtggtcccagctacttgagtggctgagcagtaaagcatattggagatttttttgtattaatcttacaacttttctgtaagtctgaaattatgccaaaatgaaaagctcaaaataaaagataaacttcaaataaagacattttagataaacaaagatggcgagatttcaggatcagcagacttgaaccaatgaacatgttaaagtacatattttaagcagaaagaaaatgattccacatggaatgtcagagatacaagaaggggtgaagaggaaagaaagtgttgagcaggtcatcagtgtaaatgaacaccaacttcataaagtacagcaagtcctcaaatcatgttgtttcattataatgatgagaaaaaaaatcactttccagtctacacatcctccccttacctgtgtgggttttctccgggtcctctggtttcctcctgcattccaaagatgtgcatgttaggttgattggcatgtgtacaacgtcccagtctgagtgagtgtgaaaccacctttgcaaagatgatggcagtgagagaagcctaacatagctgactccatcttgcctccagcctcacaggctggctgtccttgctcattcctgggcagaagccaggctaaccacgggaggaatttatttgtagtttaactttaaagcaaggatgaaaatagcccttcccaaaactaaactgccctataaaactaatgaaagaccacaatgttaggattccgggaggagcccaaattctgctaagatgtaggcatacttaaacaatagccagccattgttttggaggtcacaagatttgtgcaagatttcataagatttgagtgacttcctcaattactcctatagataagatcactattgtagaacctaaggttggcctttccagatgattttttggactttcacatttctgacgactggctgactccacccagatggggactcatgactcaactggtcctgtggtccccattcagaggtggactcagcacacgaggacagttttccacacccctatgatttcatccccaaccaatcaacattccccattccttagacccctgcccaccaaactatacatgaaaaaccctaatctctgagcctttggggagactgatctgagtgataactcccattctccttttggctggtcttaggttaattaaattctttctttactgcaataccatggtctcagtgaactggttttttctttgcagggggcaggaaaaacgcacagggcgatcacaagtatgggtgtgtgtgtgagcgtgccccccagcaggagggcatcttgtccggggctggttcctatcttatgtcctgagctgctgggataggccccagccactgaaaccctgaactggaataactgggtaaatgttatcttacttgtttttattaatctttctcaaatgtatgtatagctcacatttatttccatgtttaatattaagagtattttggtctttatttagaagttctgttatatttttgtgaccagaaatatgccataggaacttaactcttgcttagatcaattagcctatggtaaaattagtttcattatacatcatttcacttaagatagaagtttccaagaatctattgaagactttaagtagggaattaccataattataaaaatgcctctgggggatttaaatatatataaagtaagacagacaataataatagcatgtaagtcataatgggaaataaatgtagttaatgtgctggaaggtaaatatattgttcaggtggatagtaaaggatttgactaacattatattttcataaattttcaaataatttagacttctagggtaaccactacaggggagcagaggagggtgataaaaatcatttttaaaaaatccattcaaaagaagtcaagagaaaataaaaaaaatccaaaagaagagaagaaggaaaatgagacataggaatcttcactctacaacttcccaggtgattcattcatataccaacccatcgtgatgaattcaagaaatgtgctacaattctgttgttactagtaatacccgtaactgtaatgctaatagtagctgtagctgtaataggtccattgtccaatgcacccagcaagtcaatacacagagacatcaggttgcagcagagaaaaaggtttaatggtaaggtcacaaaatgaggagatgggaggaaacctcaaatccatctccctgaggaatttggggttagggttttggagcaggctaaagtgtgcaaattgttggtggatggaagagtgcagggtgaactcctactgcagggagaggaagaagctgtgttctcatgcttatcccaatcctttgtgaggtcttcaaattggttgctagaatttcgggtctgaaaaacatcttaagccatccttaacaaaagccttatgagtctaatgtcagagatcctgtctataggagcaatggggtgccaatgatcaggatctagcaccacatgactttcagctacaaggaagtgggccaaagtgcagcctgattgatgcttaattataactatacttctgtccataaccagacatgcaattcttgccacccctgtgaggatggtgatatggtttggctctgtgtccccacccaaatctcatggctaattgtaatccccatgtgttgaaggtgggacctggtgggaggtgactggatcatgggggtggtttctaatggtttagcaccatctcctagtgctgtcttgtgatagcactctcacgagatctggttatttaaaagggcgtggcaactcccccatcaagctctctctctctctcctgcctccatgtgaagaaggttctcgcttcccctttgcctcctgccatgattgtaagtttcctgaggcctcccagccatgcttcctggtaagccagcagaactgtgagccaattaaacctcttttcttcataaattacccagtctcgggtagctcttcatagcagtgtgagaacagactaatacagatggtttaaataatttctcagaaatgttactaaatcgtatcagtccatttcaagccaatagaagaagttcctgccttcaaatccaaatccatctcattcataaacagcatattttaatctatctgtttttgaaatctccctcttattcaattaatttccctggcctctctgatataaacacagcagaatgtccacaaagcatagattcaaagtaatacttcatttctcacccaaaaacatacaaaaaataaaaagtttgcagtgtgatttgttgtgtcttcttttttttttttttttttaatttatttttttattgataattcttgggtgtttctcacagagggggatttggcagggtcatgggacattagtggagggaaggtcagcagataaacaagtgaacaaaggtctctggttttcctaggcagaggaccctgcggccttccgcagtgtttgtgtccctgattacttgagattagggattggtgatgactcttaacgagcatgctgccttcaagcatctgtttaacaaagcacatcttgcaccgcccttaatccatttaaccctgagtggacacagcacatgtttcagagagcacagggttgggggtaaggtcacagatcaacaggatcccaaggcagaggaatttttcttagtgcagaacaaaatgaaaagtctcccatgtctacttctttctacacagacacggcaaccatccgatttctcaatcttttccccacctttcccacctttctattccacaaagccgccattgtcatcctggcccgttctcaatgagctgttgggcacacctcccagacggggtggtggccgggcagaggggctcctcacttcccagtaggggcggccgggcagaggcgcccctcacctcccggacgaggcggctggccgggcaggggggctgacccccccccacctccctcccggacggggcggctggccgggcggggggccgacacccccacctccctcccggacggggcggctggccgggcggggggccgacccccccacctccctcccggacggggcggctggccgggcggggggctgacccccccacctccctcccggacggggcggctggccgggctgaggggctcctcacttcccagtaggggcggccgggcagaggcgcccctcacctcccggacggggcggctggccaggcggggggctgacccccccacctccctcccggacggcacggctggccaggcggggggctgacccccccacctccctcccggatggcacggctggccgggtggggggctgaccccccccacctccctcccggacggcacggctggccaggcggggggctgacccccccacctccctcccggatggcacggctggccaggcggggggctgacccccccacctccctcccggatggcacggctggccaggcggggggctgacccccccacctccctcccggatggggcggctggccgggtggggggctgaccccccccacctccctcccggacggggtggctgccgggcggagacgctcctcacttcccagatggggtggctgctgggcggagaggctcctcacttctcagacggggcagctgccgggcggaggggctcctcacttctcagacggggtggttgccaggcagagggtctcctcacttctcagatggggcagctgggcagagacgctcctcacctcccagacggggtctcggccgggcagaggcgctcctcacatcccagatggggcggcggggcagaggcgctccccacatctcagacgatgggcggccgggcagagacgctcctcacttcctagatgtgatggcggctgggaagaggcgctcctcacttcctagatgggatggcggccgggcggagacgctcctcactttccagactgggcagccaggcagaggggctcctcacatcccagacgatgggcggccaggcagagacactcctcacttcccagacggggtggcggccgggcagaggctgcaatctcggcactttgggaggccaaggcaggcggctgggaggtgtaggttgtagtgagccgagatcacgccactgcactccagcctgggcaccattgagcactgagtgaacgagactctgtctgcaaacccggcacctcaggaggccgaggttggcggatcactcgcggttaggggctggagactggcccggccaacacagcgaaaccccgtctccaccaaaaccagtcaggcgtggcggcgcgtgcctgcaatcgcaggcactcggcaggctgaggcaggagaatcaggcagggaggttgcagtgagccgagatggcagcagtacagtccagcttcggctccgcatgagagggagacggtggggagagcgagagggagagggagagggagagggagagggagagggagacggagagggagagggagagggactgtgtcttctaataatatgcaacataacaacaaaaaaaaagcccaactagcagaatttaatgttacccaataaatgggtaatctaatggcaatttaatgttacccattccttacactttttttttttcttttgagacagggtcccactctgtcacccagactgcagtgcagtggcacaatcacagctcactgcagccttgacctcctaggctcaagtgatcctcccgcctcagcctgtcgagtagctgggactacaggtgtgtgccaccatgcctggctaatttttgtatttttttaataaagacagggtttcatcatgttgctcaggctggtctcaaactcctgggctcaagcaatccatcggcctcaggctcctaaagtgctgggattacaggcatgagccactgcacccggccattccttacactttaagtgaaatcttttagctcattgaaacagcaaattgaagttaccccttaaaaaaccacaaaacagttgagatcacttgctgctaatcctgatgtttggcctagaataggtgatcaattcccaatttaaaagtacaggcaaataattaataaagaaatttaaaaactacaggctgtgtaatgaatttaactacagcaagacactgacctcaagggcagtattattgtaactatttttaagaattacaacacagagctcattatgtgtcagtcacatttcaacttacaaaatagctaacaatggatttgacattaactttataataaatttaatcatcatccctacagacaaggatctaattttactgcatgtaaagggaaaatatacattgccattctcctaaagacctgatgagttatgagtcttaaatttaaatttgttttagaaaatcatgtctcattgctcccatacacttgtgccagatgaagtgaatagcaaattattccccaaaggacatggacagacaaagacagacagacagacacgcataaactcacacagacactcctttacagccatgacaaatatagctgcattgttaaaatgtcaccaatttttttttttttttttgagacagagtctcactctgtcacccaggctggagtgcagtggcatgatcttggctcactgcaacctctgtctcttgggtgcaagtaattctcctacctcaacctcccaagtacctgggattacaggcgcccaccatcacacccagctaatttttgcatttttagtagagacagggtttcaccacgttggccaggctggtctcgaactcctgacctcaggtgattggcccgcctcagcctcccaaagtgccgggattacaggggtgagccactgcacctggccaatgataccaatcttttaaggctccaccttcaatgctccctggtccacaatttctcaaactagatgctttcactgataagttttctggcattctctttattctacatttgttccttgagctcctgagaacaggaaccagattttacttcacattgggtcgtgccatgccttcccaacactgacagtttggaaaaagcagattctcaacagattactattggggaccctttaagccaatgtgccaattcatcaaattagtttggtttttctacccaagcagaactcacacttctacaatatatgtttcttcactaaagaataaagagccggttaagagaattcatttctttggccctaaaagcaggcacaatgataacttaaactgttaagagaaataaatccacagccctaagccttgctgttcctattataagagctaaaaacctaagctgtcgccctcagtacctgccaaagcttccaactgggccctgatttgtgaagagcaaaggccttacaggcgtcttgtgtggaagtcaccaggtcttccctaccagcggggagaaatatctaagccagccatccatggctgggtgtttaaatgataaagaaaaaaaaaaaagaagaacattttgaaaaaatcaagtgaccaaaacttgagagaatattatgagaatatcaaacacaatggagctattttaaaagaaagcagaaatctggaataatgaaatcggcaagaagaaaacactaagagcaaaaatacatttatacataagacaactatttttcaaaattcttgctcggctttggatgttctgtttgcctcccagctacaaacacattcttcacacacgctgggaatgctgctgaaaactagtcagcattcagaggcttaatccacagtcccggcgctgtgcctgtgggcttcatcgtcagacagccatttgtcctcaggagaggttaggggttgaaatgcaaatatgcaaacaactgagttcttgccctaaaatagctgagaaaagcatgatcccttatgctatcttttaaaaatggaaaaagaagaaaaaaagcttacaatcttaaggatttgtttaaataccttagtatgttgcaattttgaaggagaaaatgatggaaaggaagaaacacacttgtcctgggtaaaatctataatctggagaaaaggttgacatacgtgtgacacttgatttaccagacccactaaagatttattgatttatcaatcactgcctcaggcacttgatttcccccaagggagaattaacaattcccgccaactgatggattctattgtgaactaaaatgaatgcaagaatctatcctctccctgtgcacaacctccaattaccaaacaaacaaaaaaaaagtgtatctctctgtttggggaatccttaaaatccttaaaattaaaaattatttaacaaaagaaatactgtattaagtaattgtcactgggccgggcgcagtggctcacgcctgtaatcccagcacttggggaggctgaggcgatggatcacctgaggtcaagagttcgagaccagtcaggccagccaggcaaaaccatgtctctactaaaaatacaataattagctgggcatggtggcgggtgcctataatcccagctactcaggtggctaaggcaggagaaccacttaaacccaggaggcagaggttgcagtgagctgaagttgtgccactgcactccagtctgggcaacaaagcgagactccatctcaagaaaaaaaaatcacccttgatgccaatagacatttttaaaggatgactttaacaagctctaaaggagatacgggcatcacagaaatgtgatttcataacgtggataggaacatgatcttttatgttaaattaccaggattgactgtagcctccaccacttacgagatgtgttatcttgggcttctttaagcctcagtttcaccatctataaaatgaggagatacacttgtccttaggaaaatgagtagtgaggatgaatagaatgcatctggcctagcctctgacatgcagtcagccttccatctggcagttccattcccattactgtcactctaaaatcatatgaagtataacactatggaaggccacacagacaggctccagggctgaaacagttcacagagtatgacaaagcgcccttaacgcttttgcaaggctccttcagtgtcaactaagtgacagcttgaaaagatgtacttattaactaatatatggattaagctttctttaatattacccactaatcagaaaatctaaatctatcagaagattctaaagcaaatatgagtaaactatagcctgggtgtcaaatctgttctaccacctatttttgtaaataaaatattattgaaagtgtaggggcagaaagggggtaatcccctgtaacaaaaggcaggttaacaatagaaaagtataacaaattttttacatgcacacttatgcagggatgtcacagaaaatatgaaaactcaaagagcccagtgagtgattattattattattatttttatttttagacaggatctcactctattgcccaggctggagtgtagtggtgccatctaggctcactgcagcctcgctctcctggactccagcaatcctcctcccacctcagcctccagagtagctgggactacaggcatgtgccaccacgcctggataatttttgttgttgttgcagagatggagttttgccatgttgccaaggctggtcttgaactcctgagctcaagtgatccacctgccttgacctcccaaagtgctgggattacaggagtgagccacagttgagtggaatttttatgctatcctgaggctacagaaagaataaggggcttggggcttccagaagaggtagcacacaggttatgggaaaaggaaagaaggaaaatttgtcaaagtggtcttgtcatgcaaatgaagcatcacaggtagcagctctcagaaagaatagaagtggactgtggcaaagtttctctgacaaacctttaaacgtgttaggctcttagtctctttttcctgtgagctcatctttcctagatctggagaagagggtgctcagagaaagcctggctgcttatttcactaatgtagattttctctacagatgcaaatctcctccaccaaagacagcttttcagggctattcttgtctgcagtttctctgaataattatctcaaaatatgccaaagaagtctatttttggggtgaaatattctggtttccttcagaacacattcctatattgtttatggctgtttgggtcctacaatgacagagttgagtagctgtgaccgaagccatatggcccactgttctccccacagtgagtggtgagggatggtgagggacaggaggctttatgcagacctcaggagaaacttttgaaaggattgactcttaccattttgttgctgacagttccctggggtgagaacacagcaacgccctgcagggccaccccaaggaagcaagcaccagagacggcagcagggaaggaaagggttaggcaggacaagcaggtttaggattggccaattttcatgatttcagcaagctctggggcttaggagctatccctatcagatatcagatatctggctctgggcaattagggcaggtgcatagtggcctaaagcatgagaggtgaggcagtttggggtgtagactttgtttgtttgtttatgtgtgacaggatctccctctatcaccgaggctggaacgcagtgacacaatcttggctccctgtaacctcaaccttccagagtcaggtggtcctcccacctcagcctcccaagtagttgggactacaggcatgcaccatcacacccagctaatttccttgtattttttgtagagacagggtttcgctatgttgcccgggctggtgttgacctcctaggctcaagcaatctgcctgcctcagtctcccaaagtgccaggattacaggcgtgagccacggtgcccagccaagaagtatgacttaaccagctgcctaagaaggggatgtgaccagcctctagccaaggtctcaaaactgtgtcaaggcagcatttttttaaaaacatatttcacccgcgaagccaaaattgtttactgtttgctgacccatggtccataaacgaagtctagatatctggttccagttggaagtcacaacccacatcttaaatgtgctttccacaaatgtttatggtgataactcaccacaaatgtttatggagataactcagggaatataaaataggttaaattttcccacattgagaatgaatgaaacatgtcctagaagtcacggggtcggttctcagccccagtctcagtcctgcaggtcatggcaagccccacaactcagtggcagttcccaacaggccaggggtgagcagagtctatactgtggatgtcaccatggcaatggagcccagtggtccgaagtcagacaagcccatgttcaaatgttagttctaccacttatcaacagcatgatcttgagcaagttacctatattggttatctgctgatgcataacacactatgccaaaacctagtagcttaaataattgtcatttaacatctcctgcaatgtctaaggatcaggaatcctggggcagcttagctgggtggcttgggctcagagtctctcagaaggttgtagtcaaggtgccagccagggctaccaccaaccatctgaaggctcaaatggggttaaagaatccacttccaagttcatgcatgggtagttagcaggtgatagggtttggctgtgtccccacccaaatctcatcttgaattgtagctcccataatccccacgtgttgtgggagggacacagtgggaggtaattgaatcatagaggtgggtctttcccttgctgttctcatggtggtgaataagtcacatgagatctgatggttttataaacaggagttcccctgcacaagctctctcttgcctgccgccatgtaagacatgccttgcttcccctttgccctctgccatgattgtgaggcctccccagccatgtgaaactgtgagtcaattaaacttctttccttcataaattacccagtcttgcgtatgtctttattagcagcatgagaacagactaatacagcaggtctcaatgcctcactggctgttaggcagaggtctctgtttcttatcccatgggtcactccatgggctgcttgagtatgctctcaatatggcagctgacattccataggacaagtgatctgagggagagagagagagagcacgcaagacaagacagtgctcaagaaggaagccagtcttttatgcctaatctcataagaaggacagcctcacttctgctgtatgtaattggtcccacaggttaaccctggtacaagatgggaggggactacatgagtatgtgaataccaggaggtggggatcattgtggggggctggctgtgcattacctttatttaagcttcaggtcaggctgggtgcagtggctcatgtctgtaatcccagcactttgggaggtcaaggcaggcagattgcttaagcccaggagtttggaccagcctggcaacatagtgagaccctgcccagaaaaagaaaaaaagctttaggtctaccatttatgaagttagaatgataatgataatagtacctggtttataaggtttaaatgagaaagtgctggccgggcgtggtggctcacacctgtaatcccagcactttgggaggccaaggcaggcagatcatgaggtcaggagatcaagaccatcctggttaacacggtgaaaccccgtctctactaaaaatacaaaaaattagccgggcgtggtggcgggtgcctgtagtcccagctactcgggaggctgaggcaggagaatggcatgaacccgagaggtggagcttgcagtgagctgagatcgcgccactgcactccagcctgggtgacagagcaagactctgtcacaaaaaataaataaataaataaataaataaataaataaataaataagaaagtgcagtcaagcccactcacagggcttggcactcagtgaagcattctgtaaatgcttgcaattattatctacctcactgtggccactcctgccactaccacttccataataataacaaaagggtaaggggaacccttccgcatcacagggaagtttcctgtccttggccacttctgggtgagctctctttccgctttacaagggcaaccgtaactgtctgaaaaaataaacctccaacaaattcaaactagtctctttttctctcaccttgacctaaaatctttgaaacagacacccacataactcctctagaaaggcaaacccaaaaattgtcagagtaaaaaattcaatgacttaagataaaggggattatttccttagaaataaactcatttaagaaattgtagaaacttcagacatatcaatttcaatattcaaggacatcactcattcaacaaatatttactgggcatgtgttatacatcaggcatggctctaggagctgtataaacaacctggaatttaacagatgaaatctctgcccttagaaatttgcaggctagtgggaaataaacaaataggttttaaaaaaataaaaaatagagtatgttagctggtattgagttagaagctggtaatgagttagataaaaaataaataaaggccaggcaggctgctcactcctgtaatcccagcactttgagaggccaaggcaggtagattgcttgagctcaggagctggagaccagcctgggcaatatggcgaaatcctgtctctacaaataaataaataaactaattaagtaattaattaaagatggaaagtggatgggatgatgttaaaattatcaatagatgatcaaaaaaagtttcactgtcatttgcacaaaatccaaaaggaggtgacaagatgagccatgaggatatgtcctgaaagggtcaagtgcttggccttcagagaagagcaagtaggccaatgtgtctggagtccaataaggctagggtagaaatggtggcagagaaagttagagaagtagattgggggatgcagaatcaagcgcagtcttgtaggctgttgtaaggacttggactgggtccttacaacaaagaggcaccattggcaaaagaggcaccattgggttttgagcagaaatgtgacataatgtgatttacgttctaaaagcattactcttagacaactaaggggagtgaggacagaggcagagagagccatcaggaggccactatgaaaatccaagtgaggaatcatggcagcttgaaaaggatggcaagacagaagttgtgaaccttggtcaggttctggatttgagtgggagagtccagagtctgttaatgaagtctatgtgagctgtgtggtaaagagaagagtcgcgaatagctttgaattttttgtttgcttgtttgttttttgagacagtcttgctctttcttctaggctgtagtgcaatggcataatcacggttcactgcagcctcgacctccctggctcaagcagtcctcccaccttaacctcccaggtagctgagactacaggcatgtgccaccacgcctggctaatttttattttttgtattttttgtggagacagagcttcactgtgctgcccaggctgatatcgaactcctgggctcaagcgatcctctgaccttggcctcccaaagtgctggagttgcagatgtgagctgccacacccggctgctttgaagtttttgacctgagcagcttaaagaatgcagttgccatgtacagagatataaagaggtatggaaagagcaatgtggttgcctcaggagtacagtgtgggacatactgagtttgagataagataaccgtgggacatccaagtgggatgtaaggagacaagtgatagacaagtctggagctcaggggagaagtctgaacaggggatataaagttgaagtttccatgatttgagaagatatttccatcattagaaatgatagttaaagtcttgaggctaggagtaagtgcagacagagaaaagacctaagatctaagccctggggcactccagcatttagaattgggagaaatatggccggtcacagtggctcacacctgtaatcccaacactttgggaggtcagggtgggcagagcacttgaggtcaggagttcgagaccagcctggccaacatggtgaaacccagcctctgctaaaaaatacaaaaaagttagctgagcatggtgacacgtgcctgtaatcccagctacttgggaggttgaggcaggaggatcacttgaacccgggaggcggaggtcacagtgagcccatatcatgccactgccctccagcctgggcaacagagcgagactccatctcaaaaaaataagtaagtaaaatatagttggggagaataaagagaaaacagcaaaggactctgagcagtgaccagtaaagtcgaaggaaacccaagagagtggcatgtgtaaagccaagtggagaaatgttctccagaagggagtgacgagctgtgtccgatgctgttggggtgtcaagtaccatgagcaagtgaactgaacaggtgcagggaggtcactggtgaccttgatatgagaggtattggaggagtggtggaggtgacgccccactggaatgggaggagaactggagacagtgaagatggataactcaaggatttgggccataaacaaagcagagaaatggatggtaattggagaacatggtgcaatgaaaggaattcactcatgatccacataagctaatgggaatattccagtagagaaggaaatatccgttgatggtgcaggaaagaaaagagggaattgcttcagtgggtccttgagaaggcaagaggggaaaggatctggcgcctggtcaggggcgggcctcagacaagagccagaaagtccatctacagtaacaggagcagcgtgcctgggcacaaaggcaggaacatggatagatgtgtcccaccatgctccggccctccctgctgcactgctgatcaggcaggttgtaattaccaccctgtgtgtctgcctgtgtctccaagacctatgagagagaaagaccatgtaggtcaacatcgcactttcagtgcccaggacaaagcctggtgcagagcaagcactcaacaagtatggtgaatggctccttgcaaaacgagacaatatcgatcttacctggcagatattaaaaaatcataaaggtagaaattgtaatgcaatgtggcaatggcacaagacaaaacagacagatcaatggaacagaatttaaaaactaaaaaacgccgggtgcagtggctcacgcctgtaatcccagcactttgggaggccgaggtgggtggatcagttgaggtcaggagttcgagaccagcctggccaacatggtgaaaccccgtctctactaaaaatacaaaaattagctgggcatggtggcacatgcctgtaatcccagctacacgggaagctgaggcaggagaatcacttggacccagaaggtggaggttgcagtgagctgagatcacaccactgcactccagcctgagagacagcgtgagactgtctcaaaaaaaataaaaaataaaaatctggcccggcacagtgggtcatgcctgtaatcccaacactttgggaagctgaggcaggaggattgcttgagcccagaaggtggaggctgcagtgagccgtgattatgccactgcattccaccgtgggcgacagagtgagaccccgccaataagcagtaatggcataaaatgcttaacaaatgctgtcaatacaacctgatacaataatacaaatattcaggaaaaataatgtttgctatgtcatatgacacacaaaaatgaatcaccagccgggcatggtggctcacgcctgtaatcccaccaatttgggaggccgaggatcacttaagggcaagagttcaagaccagcctggtcaacatggtgaaacccccacccccaacccatctgtactaaaaatacaaaaattagctggatgtggtggtgggattacaggcatgagccaccacgcccaaccagaaagtggtttcttgagatggaatctgctcctggtgaagatgctatgaacattgttgaaatgacggcaaaggatttcaaatattccataaacatagttgataaaaaggtggtagtgtttgagaggatcaactctaactttgaaagaagcactatatgcaatgatatcacacagcactgcatgctacagagaaatattttgtgaagaagcccatcggtgtggcaaattttattgtcttattttaagaaattgtcaccccagccttgcaacaactgccctgatcagtcagcaaccatcaatatcaaggcacgaccctccaccagcaaaaagattatgactcgcagaaggctcagagagatggttagcattttctagcaataaagtatttttacttatttttttaatcatgccatattattttaaattacatacgaagatctaacatgtcacccacagaccatttcatccactgctctgtttggctgcagtctcttgtctctcccttcagcaatggtgaagcggataccctttcctcggggaagagaaatacatggtttgttgcccttgtcaataacaaaaatgatggaaaagctgttgctgttggcatctttcacgtgaatcgtgtcaaaagatccagggtgcctctctctattggtgatcacaccaattcttccccagttagcacctccagtcaccaaacacaggttaccagtgtcgaacttcaaagcagtgatgttgccagtctccaaatcaatctgaatggtgtcgttcactttaatgagggaatcagggtggcggatagtgtgagcatcgtgaatcaccaggtgaggggttccttttgtgcacacaaagatttttctcattttgcataacttgtacttgacttcctcaggtgtaacacgatgtacagcaaagcgacaattgatgccatagatcagacggaaaccctctcccgtcttgtcaatgctgatgacatccataaatccagtagggtaggttatatcagttcgaaccttgccatctaccttaatgaaccactgcatgcaaatcttcttcacttcatctcctgtcagggcatatttaagtctgttcctcaggaaaatatgagggagacactctctcagcttttggggaccagtggatggacgagcagcaaacacaccagtcaatttatccagcatccaacgttgtggagctgctacccgcttcagatgctgcttgggaccggaagccacagctgtaataggcacagaaagaggacctcccatcttctatgcacatagaaactgggaaccaataaagtatttttacattaaggtatgtaggccaggtgtggtgcctcacgcctgtaaccccagcactttgggaggccaagacgggtggattacttgaggccaggagtttgaaaccagcctggccaacaaggcgaaaccccatctctactaaaaatacaaaaattagccgggcatggtggtgcacgcctgtagtcccagctacccgggaggctgagggtggaaaattgcttgaatctgggaggcggaggttgcagtgagccaaaatcacaccactgccttccagcctgggcaacagagagagactccatcacaaaaaaaaaaaaaaaaagaataaacatatgaaagaaagtttagctattgtattagtctattctcatactgttataaagaaatacctgagactgggtaatttataaagaaaagaggtttaattggctcacagttctgcaggctgtacaggaagcatagcagcctctgcttctggggaggcctcaggaagcttccagtcatggcagaaggcaaagggggatggaggcatctcacatcgtggcaacaggagcaagagggaggtgggggaggtgccacacactttaaacaacaaaatctctccagaactcactatcatgaggacagtaccaagaggaaacccatccacatgagccaatcacctcctaccaaggccccacctcgaacactcgtgattacaattcaacatgagatttgggtggtgacacagatccaaaccatatcagctatagtaataataaaattgcaaattcaaataacttgattcaagtcttgcaatgcccccttctcaattaggcttaccttggtttctctaattaaaactgcaacccttggccaggcacaggggctcacacctgtaaccccagcacttgggtaggccaaggcaggaggatcacttgaacccaggagttcgagaccagcctgggcaacatggtgaaaccctgtctctacaaaaaaaatacgtctgggcttggtgtcatgggcctgtagtcccagctacttaggaggctgaggcaggaggatcacttgagcctgggagatgaaggttgcagtgagctgagatcatgccactgcactccagcctaggtgacagagcaagaccctttctcaaaaaataaaaataaaaatgaaaactgcaatccttggccaggtgtagtgtctcacaccgttaaccccagcattttgggtggctgaggcaggaagactgcttgagcctaggagttagagaccagcctgggcaacacagggagatgtcacctctacaataaatttaaaattaaaaaactacaatcttctccactccctactcctttaacttgctctgttttttttttaactatagcactttttgctttctaaaatgctaaaggatttacttatttataacatttatcatgtatgtacatgtcctccactcaaatataagtttcatgagatcagaggttgtttttttcaataatctatcccaagcactgagaatatgcctagtacatggttagtaatcaatatctatgtgttgaatgaatgcagcagattgacaaaataataatacccacggtaggcaagagtgtgaatagtcagactcatgtactgttaacaagagagtaaactgattaaatgaactatatacattcatactcgaacatactaaacaaccattgaaagtgatattgtgcagtgtggcaaaatacaattacactctgttccccaggctggagtgcagtggcgcaatcactgccccccaccgtctggacctcctgggctcaagtgatcctcccacatcagcctcctgaatagctgggactacaggagcaagccaccatgcattgttaatttctttttttttttttcattttgtagagatggggcctcactaggttgcccaggctggtcttgaatttagaactttttagtaaagttcccatcacattatcatgggaataatacaaattataaaatagcatgtacaatctgtttccaaggaaaaagtgtgtacaacaaaatcttatctatgaggtgagattacaagttgttgtttttgttgctgttgtaagacagaggctcgctctgtcgctcaggccagaatacagtggcaccatcctagctcactacagcctcgaattcctgggctcaagcaatcctcctgcctcagcctcctgaggagctggaactacaggtgtgcgccactgtgcccagctaatttttttttattttttgtagagacagggtcttgctatgttgcccaggctggtcccaaactcctgggctcaagcaatcctcccacctcagcttcccaaagtgccgggtttacaggtgtgagccactgcatctgccctgccacatttattttctacaatgaatatgtgttagatgtatagcaagcaagggaaacattttttaaaaggagaaaatagaaactacccggttaatacgcataggctttcctgttttaacaaggatatcggaagagtaagaacatattttagaagattcactctgcagttacattaaatggaaaccagcaagcaaagagaaatgggtaaccaaatgtaggctatttaaatgtcctctctattgtctgtagtttttaaactgcaaaaagtaaaagtgtgtatgaaataaattgtatgaaagtttctggatttaaaaagcccattctcttctcaggaagacccggatatccttctggaaagaaattcacgaattctgaccatccttgaagccaaactcaagcccgctggcctcacacgaatctgcctgttactccttaataagacaggacttcctttgggcttgggctgggatcaaatggtgctgtgtgaaagccacccattcctgccaatcacacaacccctgtaaacagcacggcttattgtgaaaattaattcagggagcttaaactccaccgaacagaagggtttaaaaagaaaagaaaaaaaattcccgtggtttagaaaatactagatgcattatgaccttcggtatgagtcccaggctatgtgcattataccggcaacacccgggaaaacataagctgtcttttttaatccatcagataattacaccgactacaaggacattttggcaactactagaaaatactgccctctggtgttaaggtcattccacactgattaacacaacaaaaaggaaaaaaagaaaagcctttcttaaatacaaaaaccactaccttcagggacttatgtttttgacttgcaaaaaatctgaacacaaaatcccaaaggattttacgggtatatattgtggacaccttccccactgtgcccggaaaatacctactaatgttattacaagctgtctcagtcaattcatgtcagaggatctcctctccaagagctatattcagctgtctcttgaacaaaacaaaaccaaaaagtattttcaagagcttctgtgggggagaagtttctggaaaataaactaaagattattttcacagaaaattttctactaatcctggtaggaagaatagaaagaagagcaatattacgatattttatatattatagaagtctttaaaaatgtgagacaatttttatgaaaaacaaaatagccacattaataaagaagctggcaatcattggctttatattgatcatcttattcctgcttaaaggtacttcaagaataagatagaaaggaggttctgtcgtagctctccgctataagaaaataaaactttaaaagggtggggcgtgccgttctgatggttacacacacaagaattgcatgcacaaattcagcagtcttggctgggcatggtggttcacacttgtaatctcagcgctttcaagccaaagccaccatgcccagcctttttttttttttttttttttcagatgggatctcattccgtttcccaggctggaacgcagtggcgcaatcttggctcactgaaacctccacctcctgggctcaagcgattctcccacttcagtctccctagtagctgggactacaggtgcccaccaccattcctagctaattgttttttgtatttttggtagagatggggtttcaccatgttgcccagactagtctcgaactcctgagctcaagtgatctgcccgccttggcctcccaaagtgttgggattacaggcgtgaagccaccatgcccagcccatgatcttttgtagagatggagcctcaccgtgttgccaataaaagaaaccaaagttccatggagaaatgaccgattctaagactggggcaggaaatacacaggataagccaggagcacctactagtaccagaaagtaggaaagtgctcaaaacaaacaaaccaaaaaaaagcccacatcagtggggagacgtcaaagggtcacaggatccaactgaaagagatcccaatagtcaaaactggaacaacttgagtaacaaaataaaatagattggatcataacccaaagcatggaataaacacccatgagtccacactgatattaatgattgaataaataaatgcagttctccttccgcatccactgcaaattggttccgggacccccatagataccaaaatccatggatgctcaagtcctttatataaaatggtatcgtatttgcacataaccaggacacatccctctgtacactctaattatatttagattacttataatacctaatacaatagaaatgctaggtaaatagctgttctgtgttgcttgttttatttggtttttgttttggtttggtttggttttggtttttttgtttttttgttttttgttttttgtttttgagatggagtttcgctcttgtcacccaggctggagtacagtggtgccgtcttggctcactgcaacctctgcctcctgggtttaagcgattctccagcctcagcctcctgagtagttgggatttcaggcacccaccaccacgcctggctaattttatatttttagtagagatggggtttcaccatgttggccaggctggtctcaaactcctgaccccaggtgatccacccgcctcgaccttccaaagtgctgggattacaggcgtgagccagtgtccccggccagtttgtatgaatttttactgggtttctttccctaatattttttatctgtggttggctgaatccacgatgtgggatcagagaatacagagggctgagtgtagaagggggagaagagacacgtcttccatgcggaagaagttcaatgaattctcacagatactccacccccacagaggtggagcataactcctcactcctgaagtgtggcctgcatgtagtgacttccttccaaaaatgggagaagagtaactttacagtagagaaacctgaccaacactatctctggcaggtgattaaggtcaatgccaacagtgataagtcatattgatagtacggtcatgcactacatcatgacatgagttatatcattataatcatggtgagttgtataattacttcatcatatattacaatgtaatcataatagaaataaacagcacaataaatataaagtgcttgaatcatccccaaaccatccctcaacccccaccctagtccatagaaaaattgtcttctggtccagcgtggctcacacctgttatcccagtactttgggaggccaaggtgggtggatcacttgaggccaggagttcaagaccagcctggccaatatggcgaaacccctcctctattaaaaatacaaaaattagctggacatagtggcgcacacctgttatcccagctgctcgggagtctgaggcacaagaattacttgaacctgggaggcagaggttacagtgagccaagatctgccactgcactccagcccgggtgacagagtgacactctgtctcaaaaaaaaatagaaagaaagaaaaatcatcttcaatgaaaccggtccctggtaccaaaaaggttggggacttctgtgttaagggatctgcttcattgaaagcgatgaaactaacaaaaattcatggaagttctctatcagatgcagagaaacttctaatgacctggattgaagaccaaacacagacacatatccctctcagcaccgtgacaatcaccaccaaagcaatgtcggtttgcaaggttgaaagcaaaggctggacctgactgtggtgttgaatttactgctctgggtatttcaaatgattcaagaatccttactccttacataaagtgcaagttagtggtgagtctgtgggtgctgttgtgaaggcagcagaagaatttttggaaactctggatgagctgattgtggaggaaaattacttgtcacagcaaatcttcaatatgaatgaaacctccccattctggaaacgaatgcctgaaagaactttcattcataaggaagccaagtcaatgtcaggtttgaagacttttaaggacagagcaagtcttgcctggcaacaatgttgcagattacaaactgaaaccctttatgaggaccccagggccttcaagcctgtcaattagcacacacagccagtgcactgcaggagcaataagaagccacagatgacccagctcctcttccaagaggccctcctgaattactctgccagtgagatggagaagtactgtttggagaataatatatctttcaagattggcttattgataatgctcttcttcttcttttttttttttttttgtcattttcatctcaatatcaaagtggtgtttctccctccaaataccacctctttgatccaaccaatgcatcaaggaattataacagcttttaagactattacctaaggaggacttttgcccaggctgttgctgaaactgaggaagaccctgagaagacatggatgtaattttggaaggattacaacatctattactgtgtcaagcactttgagcttgggcttggggtgatgccaccgaggaatgtatgaatggcatctggaggaagacactcaagaggtttttccatgatttcaaaggatttgccaaggatgaggaggttgcaaaagtcaacaaggctgtggttcagatggcaaacaactctaatctgggtttggctgaggatggcattgaggagctcctaaaggaatgaggagttattggaactgggacaggaacacctagctgaagaaggggcaagagcaaagggagctgctggagaaggaaaagaactctcaggaaaactcacagtgaaaaggttgacagaagcttctgcagacttcagcaaactccttaagaagtttgaaagaaggaaaagaactcccaagaaaactcacagtgaaggggttagcagaagcttctgcagacttcagcaaactccttaagaagtttgaaagaaggaaaagaactcccaagaaaactcacagtgaagagtttagcagaagcttccgcagatttcagcaaactctttaagaagtttgaaaacatggacacccaacaccaaaaggtttttattaacagacagaaatgttcatggtgcattatctgtttatagggaaatctatgttaaagaaaagaaacaaaccaagcaaaccaccatggacatatttctgaaaagagtgaccccacctcaagaagatctcaggagggtccttcaggaggtacccagaagaagacattgttatcacaggggataatgcgtgtgttactgcccctgaagaccttccaatgagacaaaatgtggaggtggaggacagtgacattgatgatcctgaccctgtgtaggcctaggctgatgtgtgtgtttgtgtcttcattcctaataaaaaagctgaaagaattttttaaatttttttaaattaaaaataaaaggccaggtatggtggctcatgcctttaatcccagcactttgggaggccgaggcaggcagatcacctgaggttggcagtttaagaccagcctgaccaacatggagaaaccctgtctctactaaaaatatgaaaaacattagccgggtatggtagagcatgcctgtaatcgtagctactcaggaggctgaggctggagaatcgcttgaacccaggagacagaggttgtggtgagccgagattgtgccattgcactccagcctgggctacaagagcaaaacaacgtctcaaaaaaaaaaaaagaaagaaagaaagaaaagagcttataggataaggatacaaagaaagacgataggccgggcatggtatttcacacctataatcctagcactttgggaggtcaaagcgggtggatcacctgaggtcaggagttcgagaccagcctggccatcatggcgaaaccccgtctgtactaaaaatacaaaagttagccaggtgtggtgccaggcacctgtaatcgcagctacccaggagtctaagacaggagaattgcttgaactcaggaggtgaaggttgcagtgagccaagattcacaccactgcactgcagcctgggtgacagagcgagactctgtcttgcaaaaaaaaaaaaagacaatatttttgtacagctgtacaatgtgttttaagtgtaattacagaagagtcaaaaagttaaaaaaataaaaagttgataaagtaaaaagttattggaagctaaggttaatttgttattgaagaaaacaatttttataaatttactgtagcataactgcagtgtttataaagtctatagtagtgtacagtaatgtcctaggccttcacattcactcaccactcactcactcactcacccagagcaacttccggtcctccactcctttgggagttcggtctcccaaagcgctgggattacaggcgtgagccactgcaaatgacagcaactccaagctccattcatgggaagtatcctatataccattttaaaaaatattctaggctgggcacggtggctcacacctgtaatcctagcactttgggaggccgagacaggtggatcacctgaggtcaggagttagagaccagcctggccaatatggtgaaaccccatctctactaaaaatacaaaaattagccaggcatgtgctgcatgcctataatctcagctaccccggaggctgaggcaggagaatcactagaacctgggaggcagaggctgcagtgaactgaaatcatgccactgcagtccagcctgggcgacacagcaagactccatctcaaaaaaagaaaaaaattctataccatatttttgctgtgccttttctatgtttagatatgtttggatacacaaatacctaccactgtgttacagttgcccatagtaaaatgctgtgccggtttgtagcttaggagcagcaggccatacatatagcctaggtgtggaataggctgtgccatctaggtttgtgtaagcacactctgtgatgctcccacaatgatgaaatcgcctaaagacacatttctcagaacgcatccccctcattaaaggatgtatgacaatatatctgcgatataatgtgacaaaaatggcactttacttttgtggtcttcctcccaaaaacccacaatcccagtctaatcatgagaaaaacatcagacaaattccagtggagggacattttgcaaaaatgtctgaccaggactcctcaaatgacaaagtcatcaaaaacagggacagtattactcaggtgtggtggccatgcctgtagtcccagctactcagaaggctgatgcaggaggatcgcttgagcccagcagttcggggctgcagtgagcgataattgtgccatgagctccagcctgggtgaccgagcaagaccttatctctaaaataaaaataacaattaaaagttaactttatttggccgggcgcggtggctcacacctgtactcccagcactttcggaggccgaggcgggcggatcacaaggtcaggagatcgagaccatcctggctaacacggtgaaaccccgtctctactaaaaatagaaaaaattagccgggcgtggtggcgggtgcctgtagtcccagctactcaggaggctgaggcaggagaatggcgtgaacccgggaggtggagcttgcaatgagcctagattgcgccactgcactccagcctgggcgacagagtgagactctgtctcaaaaaaaaaaaaagagagagagagacatctaaggacataaaatgagaatgaaagtaaagagatgggaaaagacatgccaggcaaatactcgcccacataaagctagtataacgtaagataaaataggacttcaggcagaaagatagccattacccaggcgcagtggctcatgcctgtaatcccagcactttgggagatcgaggcgggcagatcacttgaggtcaggagttcgagaccagcctaaccaatatggtgaaaccccatctctaccaaaaacacaaaaattaaccgggcctggtggtgcacacctgtagtcccagctatttgggaggctgaggcaggagaattgcttaacctgggaggcacaggttgcagtaagctgagatcacaccactgcactctagcctgggcaacagagacgctgtcacaggaaaaaaaaaaaaagccattacttaactattcaccagaaaaatatcaccttataagcatctatcgtagagcctcaaaatatataactcagatattctctttttcccaacagctttcattctgaagtaggcttccaaatgaagctcttgatgtcctcattttcccattatttacctgctttctgtcctaacctgaaccatgacattctggaaaatattccaaattttactttacataactttaagtaaaattatgaaatcatagtcactcctctgggcaaaatatatatgtgtgtgtatatcttaaaggcaattcacatggagaattatcaaggatactctatgtttagacttgaactcttgagtttgtcatttaacattagcctgaagtaaaagctcctaactcaatggttcacttgcttacaacttcctcctactccagactcaaaggctgaattagacttcctctttatcaggagctgcacaccacatagtgcttaggggttcacaaaaaaaaaaaaaacctctggcgacttcaagtccagcagggatccagcccccggtgagtgtccacacggcatcgggagggatcacctgcaagaaagagggggcttttttaaaaaacaaaaaaaggcggggcttttttttaagagactacaaaaagaaaaagggactcaggcgtaaacaaatatgtttgcagagtttatcaggaatatgccacgttacacatacatggatttatcaaggtagagcaagtttggttaattagaaggtatgaaatggtgatgaaggtagtaaaagctgctgtgggtgcagaggtgaattccctgcttccccaggcagcaaaggagtgtcaaaaacatgaagctgtcaatgacagcacttcaagatccgcccgtgctaccaattgcacatgacaatgaaattcctccttaggcctgcgggagttttctagaatgttaaaccctgaccttgcaattcctggttgcagtcatttctaatgtcaaatgaacacggttttatctttcacaggctaaccaaatgttggctggactaatgtgcattttacatattatttattttacatattacttattacttattttacatattagtgattttacatattattacttattttacatattacttatacatatgtgtatacacgcatgtatatacttatacatatatgtatacacacatgtatatacttacacatatacatatttgcatattacttattatattttacatattacttaagtaatcaccacaaatacaacatatttttgggaaaatgagtattcacaactatattttgttatgtcaaagggattttgtaagtcagaatcaattagaatgactcagtcatgtaatgcaccacatgtgtacaggtatgtttctaaaagctttaattttattttttcatttctgttatttttttgagacagggtctcattctgttacccaggctggggtgcagtggcataatcatggctcaccgcagcctccaccttcctggctcaggcgatcctcccacctcagcctccggagtagctagtactacaggtgctcgccaccacacccaactaatttttctattttttgtagagatgggttcttgccatgtaacctgggctggtctcaaactcctgagctcaagtgatctgtccaccttggcctcccaaagtgctaggattacaggcgtgagccagtttctaaaagctttaaaatggccgggctcagtggctcacacctataatcccaacactttgggaggccaaggtaggaggaacacttgagcccaggagtttgaaaacaggctaggcaacatggcaagaccctgtctctacaaaaaattaaaaagaattagatgggcatggtggtgcggacttgtggtccccactactcaggaggctgaggtgggaggatagcttgagcccaggaggtcgaggctgcagtgagctatgatcctaccactgcactccagcctaagtgacagagcaagaccctgtataaaaaaaagaaaagaaaaaagagtaatttttaaagcttggaatccttcatggtaagaaaaaactagcatttattaagtgcctactaaaaatcaagcactgttttatacgtagtgccatactttgtacttaaccctcataaccaccacacaagttatgcattatgaaaactagtttatatactgcaactcaaagaagctaagtgattttcccaaagacataacagctggcaaatgacagaattaggacttgaattcacatcttcctacaccaacgcctatattgcccagcatataacacccacccagtaaatgtttgaagaacaaatgtttaaaagccttaatttcaaaggtctatgaactggctgagtgtggtggctcatgcctgtaattctaacactttgagaggccaaggtgggcggatcaattgaggtcaggagttcaagaccagcctggccaacatggtgaaatcccgtctctactaaaaatacaaaaattagccaggctaggatgggcacggtggctcacgcctgtaatcctagcactttgggaggccgaggcgggcggatcatgaggtcaggagatggagaccatcccggctaacaaggtgaaaccccatctctactaaaaatacaaaaattagccaggcatggtggcggcgcctatagtctcagctactcaggaggctgaggcaggagaatggcttgaacccgggaggctgagcttgcagtgagccaagatcgcgccactgcactgcagcctgggcaacagaacaagactctgtctcaaaaaaaaaaattagccaggctaatttttgttgtggcgggcacctgtaatcccatctactcaggaggctgaggcaggagaatagcttgaacctggtaggcagaggtttcagtgagcagagattgtgccaccgcactccaggctgggtgacagagcaagactccatctcaaaaaaaaaaaaagtctataaaccaagactaccaaataactgccatgaattcagttagttatacataaagacaaaaaaaaatgtctaataccacacccacacatatatttagcttcaattttttttttttttaatttaagacgcggtcttgctctgctgcccagtgcagtggtacaatttcagctcactacagccttgacctcctggactcaagtgatcctcctgcctcagccctgcaagtagctgagactacaggcgcacaacactatgcctgctaattttttttattttttgtagagacaagatctcaccatgttgctcagactggtctcgaatgcctggactcaagcgatccgcccgccctcagcctcccaagtgctgggattacagggtgagccaccgcactcggcccaaatatttgtgaacacatttaaactcggtacttttaccacttgatcctgagtcatactttcagaataaaatcatacatcacgactgagagtcaatccccataaaatggctctgcgaaaggaaaacatggcccttgaattaacaagagctgtttatgaagcccaaacaagatggacaaaaaaagaggtgttgtgaaccaaagagttctcctaaacttctctcacctgtgttccctgagaataaaaaagggacaatctttttttttttttgagatggggtctcgctctgtcgcccaggctggagtgcagtggcgccatctctgctcactgcaacctccgcctcccaggttcgtgattctcctgcctcagcctcccaagcagctgggattacaggctgtgcaccaccacactcgcataacttttgtatttttagtagagatggggtttcaccatgttggccaggctggtcgtgaactcctgacctcaggtgatccgcccaccttagccttccaaagtgctgggattacaggcgtgagccaccacgcctggctccagggacaatctttttaaaacaaggaagtcacaaagaggaaaaactgatttgcccctccagaagattcacacttggaaccacagaaaggcttcacaaagaccattttccaccctccaggtgtgtaaaggtggggccacaccccaactcctccagtgtcacctttaccagccacaggtgtatttccctctccccctccctgggaacagaccctacagaaggaacttcttttcccaatgaacgaattgcagagttacagagttctgatgtttatcttcattagatactagaaacgaatgaaccatttagaataaaaccaaacgtcaacatgataccaaacggtgcatctgaacgtgtccctgacctgtgaccttagcacactgaagggtgccaaggctccaacctgctctgccccaacctgttcttctaactgccctaggtgtgtccacacgtgtggtggggtaggtgactctaagaatttcagatacttagattgcaaataatatgagataaagcataattcctcttaaataaagcaggtgctctttttaggaactcttaagttatttgagaaaaaaaaattacagttacaaagcttctaaaaaccatccccagagccataagattgtgacatcaaaaatagtggaggccaggcatggtgggctcacacctgtaattccagcactttgggaggcggaggcatgagaattgctggcatccaggaggcagaggctgccatgagccgggatcacgccactgcattccagagcgactcaggaaaaaaaaaaaaaaccaccagtggatggaaaaataactaaggccaagtgcagtggctcatgcctgtaatctcagcatttgggaaactaaggtgggggcattgcttgagctcaggagtttgagaccagtaacacagcaaaaccccgtcttcattaaaaatacaaaaaattagccaggcatggtggacatgcctctagtcccagctactcaagaggctgaggcaggaggatggcttgagcccaggaattcgaggctgcagtgagctaagatcaggccactgtactccagcacgggcaacagagtgagaccttttctcaaaaaatataaagaataaataaataaataattagggccagtattatgctgaactcatcctaaaaatatgttgttttcaggcatttacgtgatgctcagatcctctcccacattccctccactcaatatcagagcctagcttcagtcagtggagagttggagcaagaaacttacctaggggctaattaatcagcgagtcctacagagagcctgctgcgtgcaagatgctgagctgggccttcatggtggcaccacctgtgcggttctcctcctggctttcgcaaacctgtctagactcctttcctcttgcccccctgcctctgaaacacagcatctcgggctgggcacagtggctcacacctgtaatcccagcactttgggaggccaaggagggtggatcacctgaggtcaggagtttgagaccatcatggccaacatggtgaaaccctactaaaaatacaaaaattagctgggcatggcggcacgtgcctgtaatcccagctactcgggaggctgacgcaggaaaatcacttgagcacaagaggcagaggttgcagtgagctgagatcatgccactgccctccagcctgggtgacagaacaagactccgtctcaaaaaaaaaaattagcctatgtgctggcgtgcacctgtaatcccagccactgcggacgctgaggcaggagaatcgcttgaacccaggaggcagaggttgcagtgagccaagattgtgccactgcaccccagcctgagtagcagagcaaaactctgtctcaaaaaagaaaaaaaaaacatacacacacacacacacatacagagcatcttgctctctggcaccactgtcatacccaacagcctctccttcacttgtggatcagcaaaccccagctcattaaccaaggctcagagccaagacctctgtgaagccatctgtaaaggccacagtagagtggctcctcgtcctctttctccatgtgatgtggctttacaagcacagctaacttccctgtcacacggccagccccttagagaagggaggatgccttcattgccttcattaacacagagtagagttcctataatgacttactaagtcacactgagacctaacgtaaaattaaaccataaggaatcaaggcatatgggtttattgctgtacctttaaatgaaacccacagagaaaagtgaaacgatcatccagttttttaatagcagtagcatctctgaatgttgtcagaaatttttcccttgtggttatttcattacaatttaagaaactttaggagtggcatataaaatattttgcctatcttttttaatttttattttattattttcttaattttttttgtagagatgggggtttcactctgttgcccaggctgcagtgcagtggcatgatcataactcatcatagccttgaactcctggcctcaagagatccttccacttctgcctcccaagtagtgggactacaggtgcacaccactacaatcagctaattttttttggtagagacgggggcttgctctattgcccaggctcatctcaaactcctgacctcaggcaatcctcccacctcagccccctaaagcactgagattatgggtgacagccgccatgccttgcctatattttctttcttatacaatagataaaaatgaaatcaggctgggcacagtggctctcacctgtaatcctagcactttgggaggctgaggtgacaggatcacgtgagtccaggaattcaggatcagcctaggcaacatggcaaaaccccatctctgcaaaaaaaattgtaaaaatttgccaggcatggtggcacgtgcctaaagtcccagctacttgggaagctgaggtgcgaagatcatctgaacccaggaggtcaaggctgcagtgagctgtgatcatgccactgcactccagcctgagtcacaaagtaagaccctgtctcaaaaaacgaaatcaaagtctccacctcccaagccaaaccacaacccttcctgagctccccaccgtcccatctcagtggaagcccatggagcaccatccagagtccccaggtcagaagccctggagtccactctggatgctgcactagacactgcccagggcagcacacctctcctgaagtgctccctgggtttttcctctgtccccactggcctcttctcttggtctcctctgcagatttctaaggcccactccaaaggctggcttggtcctcagtccacactctctcttgcagaaaacaatgcaggtactctgcccagattgcccaggttcctgtatactatggctttacacacctttagctgtaatgtgattttggtcctaatggcagctcctgggccgcttcctttttttttttttttgagatggagtctcgctctgttgcctagggtggagtgcagtggcatgatcttggctcactgcaacctccacctcccaggttcaagcgattctcctgcctcaacctctcaactagctgggattacaggtacccaccaccacgcctggctaatttttgtatttttagtagagatgtgatttcaccatgttggccaggctggtctcgaactcagaaccttgggtgatccgccttggctttccaaagtgctgggattacagtgtgagccactgcgcctggccaacctcttctttagaggactgcctttgggttgccagagtcacaccgtccacaggcacaggagctagaagtgcctgggaggcactagccttagcccaaggttaacacgcctctgcagcaccatctacatgcacaaatgcccctgtcagatcaaactgaagcctatccactgtgggactctggcctgatagtacattctgcttggcttcctccccttccgtatctgcttaccacaatgtcttgtttaaaattaattcatagtttttcagtagagacagatgtctcactatgttgcccgggctagtcttgaactcctggcctcaagtgatcctcctgcctcagcctcccaaagtgctgggattacaggcatgagccaccacacccagcccacgacaatctcttactagtctttgctgggactagttccttaataacatcatatttgctcaaaaattattgtctcaggatctacttccaggaaactcatttggaaacaggaatgggggtgctaaggaacagattcttttttctttttttttttttttttgagatggagtctctctctgtcgcccaggctggagtgcagtggtgtgatctctgctctccacaagctccacctcccgggttcatgccattctcctgcctcagcctcccaagtagctgggactacacgcacccaccaccacgcccagctaattttttgtatttttagtcgagacacggtttcatcgtgtcagccaggatggtctcgatctcctgacctcgtgatccgcccgcctcggcctcccaaagtgctgggattacaggcgtgagccaccgcacccggccgctagggaacagattctaagatgggattttagagctggatcattccccagccaaatggcaatagagtccccattgtcagtgatgagtggattaatggcaagctgtgcaattgcttaactaataatcactagtactttcatctgtgatgaattggctgagatacaaaggaaaaggaagcactggttcacgagctatatttctagcatttgatagacgtggggaagtagctacacagactcagaaatctaatcacttgttgttcagtgctattgaagcaccgaagaaagaccatgacaggttcaggacagccaattatcaactcacagcatggtgtgaaagtcaggtggcctctatggcagcatttaatatagccattttagcatccttttgattggtgttgcatgatacatcttttcccatcgctttaaatttaacctattgatgcccacatatatatgtatatgtgtgtgtgtgtatatatatatgtgtgtgtgtgtgtgtgtatgtatatgtgtgtgtgtgtgtgtgtgtgtgtgtatatatatatatatatatttttttttttttttttgagacagagtctcactctgtcacccaggctggagtacagtggtgcagtcttggctcaccacaacctccgcctcccaggttcaagcaattctcgagtctcagcctcccgagtagctgggattacgggtatgtgccaccacgcccagctaattttgtttttgtttttgggttttttgtttgttgttgttgttgttgttttgtatttttagtagaaatggggttttgccacgttggccaagctggtctcaaactcctggcctcaagtgacccgcctgcctcagcctctcaaagtgctggattacaagcaagcaatagccacaacgcctggctgatgcccttatatttaaagtgtttcttgcaggcagtacataaggttgggtcttacttttgacctaatttgacaatctctccctgttaattggggtgtacgcagcatttccatttaatctgattactgatatggttgggtttagaagttatcatgttgctatttgttctatctgtcccatgtgttctttgttcttttgttcttcttttgttgcctgattttggattgagcattttttatgaattcgcgtatctcctttgttgacttaccagccataagtctttgttgtgtcattttagtagttgctttagggccacctaatccatggagtaagataattcatggtagaataggctaaaaagaagccccagaaattgtccttcctctgaacttgatagtacatttttaaaacaataccattagaatgacttctggaacgacagagtgaggacctccatggactcactttagagaaatgaccaaaactgatgagatttatttaaaaaaaaaaaaaaaagccaggcgcggtggctcatgcctgtaatcccagcactttgggaggccgaggcgagcagatcacctgaggtcaggagttcaagaccagcctgatcaacatggtaaaactccgaatctactaaaaatacaaaattagctgaaaatacaaaattagccaagcatggtggtacacacctgtaatcccagctacttgggagcctgaggcaagagaatcgcttgaacctgggaggcggaggttgcagtaagccaagatcgtgccattgcactccagcctgggcaataagagcaaaactctgtctcaaaaaaaacaaatgatgatttaaagtctctggaaattgtcctcatggcatgaagcaaataaagatgcatttattcaagaaaatctattaaatctcaataagaacactcagagtctgtagcatttgagtcacaactcactccttccctaacccccaactcagcatgatgaaagtcctacccctggccaggtgcagtggctcacacctgtaatcccagcactttgggaggccgaggcagatggatcatctgaggtcaggagttcgagaccagcctagccaacatggtgaaaccccatctctgccaaaaatacaaaaattagccgggcttggtggcaggcaactgtaatcccagctacacaggaggctgaggcatgagaattgcttgaacctgggaggcagagattgcagtgagccaagatcatgccacagcactccagcctgggcaacagagtgagaccctgtctcacaaaaaaaaaaaaaaaactgactgtggtgatggttgcacatatttgtcaatatactaaaaaccactgaactgtatactttaaatgactgaatcgtatgatatgtgaactatatctcaataaagatgggttgcttttttttaatctaacgaacttgatattaaaaggttaaataaggccaggcacagtggctcacacctgtaatcccaacactttgggaggcgaaggtgaaaggatcagctgaagccagaagttcgagaccagcttgggcaacatagtgaggcccccatctctacaaaataaaaaataataataaatagtaataataaataaaagattaaataagaaaacagtatcttaaccttttttttttaagtacaaaggtaattactagaacaaaaacatctaccttcaggctggctgcagtgactcacacttgtaattctagcacttcaagaggcaagggcagttggattgtttgaggaatggagtttgagaccagcctgggcaacatagcaagaccccatctctacaaaaaatttcaaaattaactaggagtggtggtacatgcctgtagtcccaactactcaggaggctgaggtgggaggatcacttgagcccaagagttcgaggctaccatgaggtatgatcataccactgcaccccagcctgggtgacacagtgagagcctgtctccaaaaaagcaaacaaacaaacaaaaaatccatcttttaaatatcctaaatatccaaatacatttagaaaataaaagaacaaagaaaatatcaaatagagaaggaaatacagaaacacatataacatatatataacacacataacaattatattataaaataatatgacacaattgagactgttaatacatatctgtgggcttaagtccactgagaggattgactagtttattaaaagacaaagattcggccaggcatggtggctcatgcctgtaaagcacttttggaggtcaaagtgggcagatcacttgaggtcagaagtttgagactagcctggccaaaatggcaaagccccatctctacaaaaaatacaaaaattagccaggcatggtggtgtgtgcctgtagtcccagctatttgggaggctgagacaagaaaatcacttgaactcgggaggcagaggttgcagtgagccgagattacgccactgcactccagcctgggcgacagagcaagactccatctcaaaaaagaaaagaaaaaaaaaaaaagacaaagatcaaagatttccagcttcactcacaaagcaaaactcagctatatgctgtatacatgattcgcacatgaatggaagtgattgcgaaaggctaaaaataaaaagatgggcaaaggcatttaacagtcaaatggagaccataagagaacagcggagtgacaagactcaatttgcactttaaggagatggctcaggtttctgcgtggaggatggattgaggggggtgttgttatataaagtggtcaaagatggcctctgtagattggccatctttgtttatttcttcaccgcagactgagacctattcgttcaaaggccgactcaaatttttatacatccagttgttctaaaaatagcccacacaaccgggcgcggtggctcacgcctgtaatcccagcacttcaggagaccaaggcgggtggatcacctgaggtcaggagttcgagaccagcctgaccaacatggtgaaactctgtctctactaaaaatacaaaaattagccaggcgtggtggcgggcacctataatcccagctactcgggaggctgaagcaggagaatcacttgaacccgggagggggaggctgcagtgcgccaagatggcaccattgcactccagcctgggcaacaagagcaaaactccatctcaataaataaataaataaagcccacacaagcagattttcagccattgcttgtgaaactccacccagcatctgctggcacggatcagatggagtctgtggttctgagacttcaagctgctctctgacctagagactcccctcagtgctgctggagggcaccacctagacatgtcaacccccctcatcagtccccctctctcctgggagtgcccttgctcttctccccttctaagtagagacccccaagctctagcctccagagagtttcttgctgagacgtgcttgctccccatggcaatgtccaagcatcacacattaagcttgttgtgctacttctactttatggttctctcttttcccttgctcaagtctcatttcccccaaatcctctacagtgggcaatcaccccaatgaaagatgaaagcagccagacaggagaggactggaccaggcatggtggttcgtgcttgtaatcccagcactttgggaagccaaggccggaggatcacttgagcccaggagttcaagaccagcctgggcaacatagggagacctcgtctacacaaaaaaaaaatacaaaaattagtctagcatggtggtgcacgcctgtagtcccagctactcagggggctgagtgggaggatcacttgagccctggaggttgaggctgcagtgagccaagatcacaccactgtactccagcctgcagtctgggtgacagagtaagatcctgtctcaaaaaaaaagaaaaagaaagagagatacactttgtatcatgtcccaatgtatgtatgcatgtatgtgtcacacacatacatatacatccatgaaaccatacttgccttcactttgccatgtatttttatttgcattttctatgtgtttcttttttatttttaagagatgggggtctcactatgttgcccaggctagagtgcagtggctattcccaggtgttgtcattgtgcactacagcctggaattcccgggctcaagcagtcctcctgcctcatcctcctaacctggagctacaggcgcaccaccatcctttttttaaattttattttcaaatagttgctagtcatgagcctttaaattaacttcatgatccactaacaggcgacatcctgcagtttggaaaaccctgcatttcaccatgattgcttatgtttctgctccttaaatatgtccttggatttatgatgaaaatgggggaaaaaaagtgattttttttttcatgagttacctctcttttctccatgttccctctggtttttctaggaagcccacactttgcattgctggttttcaataatagtgaactaaaggaatccgagaacttctagacacaataggcctaagccaaaggaaaaagagagtccctgaagcaagtgttttctcctggccgtaagaagtactcacagccaggcatggtggctcacacctataatcccagcactttggaaggccagggcaggaggattgcttgagcccaggagttcgagaacagctgggcaatatagggaaaccgcatctctataaaaaaatacaacaatgaggtgtgatggcacatgcctgcagtcccagtacttggaagactgaggcaggacaatcaattgagcccaggaagtcgaggctgcagtgagctatgattgcaccactgcactctggcctgggcaatgaagtgagaccctgtctcaaaaaaaaaagaagaagggggagggggaggggagaggaggaggaagaggagaaggacaagggggaggaggaggaagaggaggaggaggaataggaggagaaagaggagaaggaggaggaggagaaggataagcagaaggagaaagagaaggaggagaaggagaaggagaagaaagaagacagaagaagctcacagccctctggatacctgcagttaaaggaggcagcctgtgtacaactgagcccccagccacttactcattactgtctgtgtgactccttgccgaatacatgcacactctctggggtgtctttgtaagtggaatttaggaacaagagaatttgctaaaatgggaaatttgagataccttcctatattcttttggtgtataaagtagcacagaaaaggaaatatacataagaacttcatcaaagttctttagtgaataaagatgagaatctcattattaaattaattaacattattaccaagaacagaataaacaagaatccagatgctggaaatgttccctttccttttatttagaataaaaatattacatagaaaaagaatattctgtatataaatacaatagaacaagtgacctacagtttgacttctccacagcctagagtacccacagagtcatttttttgaacacaatgtatcttatgaataagcctctacacttttaaaattgagtttttctctttttgaagtacagcttcaagcaactacaagtttccatcctgctaaccccaggcagcagttgcttttaacttctatcttttatttaaaaaacttaattggaagtttttgtagccagaaggagcacttcaaagaaagaaaaaaaaattaccaaaaattaatactttatgtcagaggttagtagggaaagaaacaaagattacagaaaaagaagagttaatggtatctaacaaagcagtgaaagaagaaaagaggcagaaaacgaactgaaggaagaagtgaaaagggaaacttgtaacattaaaaacagaaaatgtggagtaacattttccttactccaaacaggatgagacaacacaaacgttacagcagcatttataatttcctgcacagccaaaaagctctgtgtacaaatcctcccgcccctgctcaagtcttttactcctgtctacaattacacatcaagggaccacagcacttcctgcactttaatttccagacactcctgtcactgtcaattctaaatcaactctgacaaaacagtattaaaacttcaggcatgatttagtattctgcctttgaggcgagtgcagaggaagaaggccctggattgagagggtcaagagatgagggtctttgtcccagctctgccatcagtttacgtgacactttaagcaggtccctttccctctctagagttcagtgatgtcattgtacaggaagagggttggagattcctggggttccttccagctctgataaactgtggcactatgatcctagcgtattagtgatcttagtgaatctcccataacactcgccaaagatactgccaacagggaaattagatgactatccaagactcgctccagaagttcatagagtcagagtcaataatagatcctactatttcaaatgggaaaaatttcctatgcttggctgatgacaatcaaattgaaaacaagtccccaatatcagaatagctatgaaataagactaaagacttcactgttctcagacaggcaagacttttcttacataaaaaatcataacatagtgttgatagatcagaagaatgattatagtttacagtaatctattgcatatttatttcaaaatagctagacgagaataatttcaatgtttctagcgtaaagaaaaggcaaatatttaaggtggtagatatatcaattgcactgatttgatctgagctatgattgcaccactgcactccagcctgagtgacagagcaagaccttgtctcaaaaatagatgggtacataaataaataatcacctctacgccaaaagtatgtatacatattacataccaataaaaataaaatattaaaaaatcataacagcctgtctctacaaaacatttaaaaattatccaggcttggtggtacgcacctatagtcccagctactcaggaagccgagttgggaggattgcttgagcccacgaggtcaagactgcagtgagctattattgtgctactgagctccaacctgggtgacagagcgagaccctgtctcataaaacaaaacaaggctgggcacggcggttcacgtttgtaattccagcactttgggaggcccaggtgagcggatcacttgaggccacaagtttgagaccagcctggccaacatgccgaaacactgtctctactaaaaacacaaaattagcccagcgtggtggcgggaagcctgtaataccagctactagggaggctgaggcaggagaatcgcttgaacccaggaggcggaggttgcagtgagccaatattgcaccactgcactccagcctgagcaacagagcaagattttgtcgaaataagaaagaaagcaagaaagaaagaaagaaaatttgaacaataaacttgatttaatgaaccaataactaaaaaacagactatatactcttttcagtcacatggagcatttacaaaaactggccattcaaaaggttaaggcaaatgttttttaaaaagttaaaaacaaatgttaaacattccaaagcgtacaggccttaatctctatcaacatgtaattaagttaggattcaatcataaaaatatatttttttcaaatctgtatgtttggaaatttaaaaacatttcagaaatacaccgaggtcagagaaaaaaatatcagggaaattaaaaagtgcttataaaggaaaacattaaacataacataccaaaactagcaggataattctactcccatttagaatgtaggaggttacaagacaatgtttccccactctaacaacaagaaaaagatggttaaccgctaatcacggtctttccaagtacatcagagagctgagaatgcataaaacctaatgaaaagaacccaaaaactgacaagcatggttgccttcccttggtcgtgcagcagggggcagaggatctcgctgcagatgggtaagaagggtgaacttttaatgaatttctagagatgaaatgaaggtttgagtgatggtttagaatccctaacagccccatacacacagactctgtgctcatagccaactctactccatggatctttaccaaatgtatgtgaaaaaaactggagacagaacaggagaactgttgagagaccctctctgagcacatgtgtggagcctctgggcctgcggaacaataaaagaaatgactagcgtctgtgtgactggggtaccagaggaaagaagaaagagaaggagtcaaaataagtattagaagaaataatggctaaaacttttccaatttggctaatttttagaattttttgtagagacaaggtctcactgtattgcccgggctggtctcaaactcttgacctcaagaaatccttccagagataaactcacagattcaagaaactcagtgaagcacagtagaataaacacaaagaaaaatacccctatgtatatcatggcactagtgaaaccaagaataatgagaaaatcttgaaaatagagaaaacgtagagcaataattaaaattaccagccacttctcatcagaaagtatgaaggcagaagacagggaaataacatctttgaaatgctaaaagaaaaaagaaacgaccaaccaatagttcagtatacagagtaaatatccttaaaacatgaactcaaaataagggcattttcaaataatataggttgatgatagaacaaaaggaaaagctataactatcaagtttctagaagaaacacagaatgtcttggaaaacttgggataggcaaagattattttaaaggaaattgaaaacactaaattttaaaagcttatgacaaaccgggtatcattaaaactaataacttgggctcttaaaaagataccattaaaagaaagaaaaagcaagccatagaccagaagaaaatattcaacacacatgtcttgtatttagaacaaagaacttatatcgggaagtgaaaataaaagaactcttacaaatcaataataataaacaatccaactgaaaaaaaaatgagcaaaagacactgtaagaagctgtatggatagccaacaagcacattaaaagttgctcaaatttaaggaaacgcaacacaaaaccactgtgaaataccactactcccccattcgaatggctaaagtaaaaagcattgacaagccaggcgctatggctcacgcctgtaatcccagcactttgggagaccgaggagggcggatcacctgaggccaggagttcaagaccagcctgggcaacatggtgaaaccccatctctactaaaaatacaaaagctagctgggcatggtggcgcatgcctgtagtcccagctactcaggaggccaaggcaggagaatcacttgaacctggggagttcaggttgcagtgagtcgagatcgtgccactgcactcccgcctgggtgacagagtgagaccctgtctcaaaaaaataaataaataagtaaagtctggaagagagagatgtgattacctggtaaagagttttccacttgacatttctcagcatataaatgggttatgggtgagtcaagatgtgacagctgaaggctgcgagagcctctagactggtcacctcaagccctgggtggccttactgaccccagtgtgccaaaacaagtggtcattttctgcatgggccatgatatgaaaaagtttaggaagtattaacataaggaacgggaatatagagaaaaggctcaaatacagaggcctggggtagctagcacgtagaggccaggaagatgaggaataaccagcaaaggagactaagaaagcatgagcagtgatgaaggtggtgagccatgacagtgtgttatcccaaagccaagggtttgcaaagagtttgaagaaaggagtgactatgtcaaatgctgtagacgggtcaagaaagagaaggtttaggctaggcatggtggctcatggctgtaatcccagcactttgggaggccaaggcgggcagatggcttgagcccaggagttcgataccagcctgggtaacatgatgaaaccctgtctctacaaaaaatttaaaaattagccaagcgtggtggcactcacctgtagtctcagctgctcggcagggctgtggtgggagtatcacttgagcctgggaggttgtggctgcagtgagccaagatcacaccactgcactttagtctgcacaacagagtgagaccctgtctcgaaagagaaagaaaagaaagaaaggaagaaagagagagagagagaaaaggaaggaaggaagggagggagtgagtgagggaaggagagagagagatgaaagaaagaaagaaagaaagaaagaaagaaagaaagaaagaaagaaagaaagaaagagaaagaaagaaagagaaagagagagaaataaagaaggaaagaaggaaagaaaagaaagaaagaaagaaagaaagaaagaaaagaaagaaagaaagaaagaaagaaagaaagaaagaaagaaagaaagaaagaaagaaagaaagggaaagaaagagaaagaaaagaaaagaaagagcgagaaagagagatggggtgcagtggctcaccctgtaatccgagcactttgggaggccaaggtaggtggattacctgaggtcgggagttggaaaccagcctgaccaacatggagaaaccctgtctctactaaaaatacaaaattagctgggtgtggtggggcatgcctgcaatctcagctactcaggaggctgaagcaggagaatcgcttgaacccgggaggtggagattgcagtgagccgagatcgtgccattgcactgcagcctgggcaacaagaatgaaactccatctcaaaaaaaaaagagagagaaaaagagagagagagaaagaaagaaaaggtctgagaaatgaccaccgaatttagcaaatcagagtcattggtgaccttgacataagttacttcagtagaggacaaggcagggttgaaaacctgaccacatgcattcaagaaagaatatgatcactttttcaaggagttttgctataaagtggaggagagaaataaagtcatccctagagaaggttatagaataatgaagttctttgaatcttaagatgggtgacatagcaaacgtacatccgacgggaatgttccagtggatggggaaaatgtgatgagacagaaaagggaaaatctgctggagagtgttcttaagaaggcacaagaagataggatgtaatgcacaaaacaaaaggtttgccttagaagtatacccggaataacagaagagaaggcaaagtatatatggagagacacatagaacatcgtgcagatgtgatggaacatatgcaagttctctttcattgttgaaagtgagagtaagagagaagatatttgaagtttcaggaaaaataagttgttaaggagtcatctaaaataatctattgcttttgttactaagtaatcaatgggctggctgcccaatgcacatagaggctaatagcatggcactggcttttgaaaaaagaaatatttttttgtgaattgactggcaaggagacaggaggaaacactcaaatctgtctccctgagctgggatttggatcaggttttataagcataggataatgaagtatgatctgattggatcttgcagtgaggtgattgccaggaggcatgatctaactggatcctgccaagaggtaacatcagagcttgatctgattggatcctggatgccaccacgtggtgtctgctttttaattcagtcccctctcctcagtccaagcacttaggatccccctaccctgactgttcatctgggcatgctcaagttacatgacctttgacctgggggtccatggcaactgaaaaacaactcacaactttgttacataaaagttgagccagattgatctggtgcaattacactttcttccctcaacaatcaatccagggaaacagccattttaagaacctgctactcagtacatatacatctaatgaaaagggttcttatgagcatatgtattatatttaagctatatatttaatcttcaccatgagaaaacacaaatgataaacataccttatctcaagtaattacaccatattccccactacctctgctctcgaatgcacagtttagcagttatttgcgctaaaattatccttctacacatcaaatccactaaaggagctagtctcttttaaagaaatgaacctaataatctgtatgaataaaaccatgtcccaaattctctataaagtatattaagagcagaactatgatttaatgccaagtaaattttaaatattacaccttaaaatgcatcatgttcacataaacaattatataacagactggaaattcaggagctaataatgcagttttcagcaacaaaatcaaagttcatttcctccacagcacccctgtctctacagcccactcatatactatgtatgaacagcttccatatatatgatgtttctcagtgggttttctccaacctgggcagcagagcaaaaccctgtctcaaaaaaaaaaaaaaaaagaaaaaggaaagaaagaaaaatggccaggcacagtggctcacacctgtaatcccagcactttgggaggctaaggctggtggatcacctgaggtcagagttcaagaccagcctggccaatatggcgaaatgctgtctctactaaaaatacaaaaattagccaggtgtggtggtgtgctcctgtaatcccagctactcaggaggctgaggcacgaaaatcacttgaacccaggaagcagaggttgcggtgagccaaggttgcaccagtgcactccagcctaagcaacaaaagcgaaactccatctcaagaaaagaaaaagaaaaagaaatgtcattttcattgagcattggatcaatttagaagttgatattcatagaataataaccacatcacactatctttctaaaattccaacacagaataataagaccaattactgggtatgctcagcctgtgggggccaagagggcagatattctctgcatctatcccacttggagagtccagagaagcagaggatgttttccagggaggctgctgagatgtagggcccacccaggaaagtctgagggctatcctgggaaaaggataaggataaggataactcattttttcaaaaaagcaagtgggagaggcattagatttaaagtatttgccaaatacaaagcaatttcaaagccttaaaaaattctacaagatattcattcaacaaatattgataggccaggtgtggtggctcatgcctgtaatcccagcactttgggaggccgaggcgggcagatcacctgaggtcaggagtttgagaccagcctgaccaacatggtgaaactcatctctactaaaaacacaaaaaaattatctgggcatggtggtgcacacctgtaatcccagctacttgggaggctgagacagaataatcacttgaatccgggaggcagaggttgcagtgagctgagatcgagccattgcactccagcctgggcaataaaaataaaaatacagctaatggtgtttctttctcggtggcggaattcagggaggattatatattttctaaattttatcactgcagttttctgcattgtttgagctctttaaaatgaacaaaacggcttgttttcacacatccaaatgccgagccgccaacacacctaggatgccccatggaagctgaagccacacttcccacatggcccctctggccagccgggcatctcagatgacagctgcatacaggccagcacctgcagctcagccgccaacagtggcatccacctctgcagttggctctcctgctgctgctccccagcagccaggtctgagggcccagatggcaaccactgcagctgacgtggctgtgggctctgctgtggggcacacactgggccacgccgtcaccgggggcttcagtggaggaagtaatgctgagcctgtaaggcctgacatcacttaccagtagcctcagggaatccagtcggcacagcagcagcggccttgcttctatgagaccagtttttggaggatgcacagaaccagggtgacagaaagctctgtgagggtttcagtgaggtgctgaaacagtgcagaccttcaaacagattggcctaatcaagaaggtcaaattggagtaatgaaaaatcagctctcataaccaagttaatttagtataaaaatataattgatagtgaaggtataaagtgtaaccatcagttaaacctctccttgtcattcatagcttccttgcttcagaattgaaatgaaagaaggtgctcttactgtgcagaatttcattaaggtcgtgtagaatttggggctgggcaaatgtttgtgtagcctccttaaactagctgtgattttattctctgtgagttaattaaaataaagtgattttcttccaaaaataaaaatgaaaatgaaatgaatgaaatgaaaaatgtaatatcattgtcatcaaaccaacactgatttttctttaaaaaaaaaaaaaaagatttaaattaaatatgcaaaaatgttcactgctggctgggtgaggtgactcatgccagtaatcccagcactttgggtggccaaaggggtggatcacctgaggtcaggagttcgagaccagcctggtcaaaacggcaaaagcctgtctctactaaaaatacaaaaaattagccaggagtggtggcgggtgcctgtaatcgcagctacttgagagcctgagaaaggagaattgcttaaacccgggaggcggaggttgcagttaggagagatcatgccattgcactccaacctgggtgacagagagagactctgtctcaaaaaaaaaaaaagttagcagtgattgattctcagtgataggaatgtggatgattgttgttttcttttcttttcttttctttttgagacagagtctcactctgtcaccagactagagtgcattggtgggatctcagctcactgcatcctccgcctcccgggttcaagcaattttcctgcctcagcctcccaagtagctaggactataggcaggtgccaccaagcccggctaatttttctatttttagtaaagacagggtttcactatgttggccaggctggtctcaaactcctgacctcactattgtcctgcctcaccctcccaaagcgctgggattataggtgtgagccaccgcacccggccaaaaaaaattttttttaaccacaaaaaggaaaacacttgaagttgggctataaaggaaagacttcagggaagacggaagatgaatttgaataaggccgtgaaaaatgaataggattcataaaagcacaaagaatgagaaagttcgcgaaagctcaagtaaactagttttgctgacgagactatggtttagtgaataattagaaggaagcctcaatacagaatgaggtcaactcagggaggaccattaatgccaggatgagaagtctgagatttattttatgggcaatgagagccacttaaacgtttaatgcaggtctttcacatgatcagtgtggtattttaggaagaccacactggcatagcataagcccagatgtggggaggctgtcactaaacccctcagtctccctctaggatgccttttttaaaaataaaaaataataacatgagctttgggaacagagttaccctccaacaatagttgctggatgaacatctccatgacattcactgctgcacattccttgtttaattggaagagaccacagatgaccaaatcataggctgacacattcaagccctgccttgtgataaaactaaataagacagggcttacccagggtaaccacaggacaagggggaggaaccttccactctgctccccaagggtaaccactgaacaagcaggaggaaacttccactctgctccccgtttcctacatccagacaaaatgccagcatccctagtccacttcattttgttctagtcaagtccattttttttttttgagatgaagtctcattctgttgcccaggctggagtgcagtggcacgatctcggctcactgcaagctctgcctcccgagttcacgccattctcctgcctcagcctcccgagtagctgggactacaggcgcccgccaccacccccggctaattttttgtatttttagtagagatggggtttcactgtgttagccaggatggtctcgatctcctgacctcgtgatccacctgccttggcctcccaaagtgctgggattacaggcttgagccactgcgcctggcccttttttttttttttttaagagagagagagacaaggtctgactctgttgcccagactggagtacagtggcgagatcttagctcactgccagcctctacctcctgggcgcaagcaatcctccagcctcatcctcctgagtagctgtctccctagtagtgtaccaccatgccctgctaattttttaattttctaatagagatattgcccaggctggtctcgaactcctgggtttaagcaatcctcccacctcagtctctgtaatcccagagtgctgggattacaggcatgagccacagcatccagcctaatttgttaaattttttatgagctctgcgagcataatgtaaagatcccaatgctggtcctcatcctctccatgtacctgccattggtgttcatgctattaggtcttaggacttttgggcttcctacccttttgctttgcctctctttggctgtgatagcaatggtcatctctgcagattggacaaaaccaattgtattagtccgttctcacgctgctatgaagaaatacccaagactaggtaatttataaagaaacgaggtttaattgactcacagttctgcatggctgaggaagcctcaggaaacttacaatcatggaggaaggtgcttcttcatagggctgcaggagagagaatgagagcaagcaggggaaatgccagttgcttataaaaccatcagatcggctgggcatggtggctcatgcctgtaatcccagcactttgggaggccgaggtgggcagatcacgaggtcaagagatcaagaccatcctggccaacatggtgaaaccccgtctctactaaaaatacaaaaattagttgggcatggtggcacgcgcctgtaggtccagctacttgggaggctgaggcaggagaattgcttggacccgggaggcggaggttgcagtgagccaagattgtgccactgcactccagcctggcgacagagcaagactccgtctccaaaaaaaaaaaaaaaatcagaccctgtgagattcactcattttcacaagaacagtatgggagaaaccatccccatgatccaattacctccacctggtcccgcctttgacatgtgggtgggacctttacaattcagtgtgagatttgggtggggacacagggccaaaccatatcaccagttattggcattggcatcttggcctgtactctttaccttttagggctttttgtcctggagcagatgccacagaaagactactgaaatgcttatttctacccctcaaaacactataaacacaggggtgaggctgtgcaggctcttctgttctccaccaaagtgttctacacttcatcatcttgggaaagaagcttaattcacacaggctctcattctgtgcttggcataaagtatacccagcagcagaaaaccaggaggttaacactcagtctcagacttctcttcgttttgttaaacactctaaaaaatgtaacagggcatgctatgtcttcctgatcaaatattatcaatatctcctaatatcccaaataaaatcttttggaaggaaagaaactaatatttgtaaggggtatcttgtgtgccagactttcttctaagcagtttccatacattgtttatttaatctccaaaacaacccttttagttgggtatttttgtttgttggttggtttttgtttgagacaggctctcactctgtcacccaggctggaatgtaatgatgtcatcatagctcactgtagcctcaacctcccaacctccccagcccaagtcatccttccagctcagcctcccaagcagctggaatgacaggcaccaaccaccacatcaggctaattttttaattttatgtagagatattgcccagagtggtctcagactcctaggctcaagtgatcctcccacctcagcctcccagagtgctaggattacaggcatggcactggcctccaatctgattatttcgataaaagtaatactgtggaaagccgactagcagtagctgctaaaattaaacatatacataccttacgacccagaaattttacttctgccagggcctagtggtgcattcctgtaattctagcactttgggaggctggggtgggaggatctcttgagcccaggagccggaggctacattttgagctatgatcacaccactgcactctagcctgggcagcagagcaagactctgtctcaaaaacaatttttttttaatgtaaaaagagtgtgaaatctttgggatttcctcatgcactcatatattacattttatggggttcacacaaactaaacttggtagtagtacaattatttgataagaatatattttagctccctctccctctccctctttccacggtctccctctggactgtgctgctgccatctcggctcactgcaacctccctgcctgattctcttgcctcagcctgccgagtgcctgcgattgcaggcgcgcgccgccacgcctgacgggttttcgtatttttttggtggagacggggtttcgctgtgttggccgggctgatctccagctcctaaccgcgagtgatctgccagcctcggcctcccgaggtgccgggattgcagacggagtctcgttaactcagtgctcaatggtgcccaggctggagtgcagtggcgtgatctcggctacaacctccacctcccagccgcctgccttggccccccaaagtgccgagattgcagcctctgcccggcggctaccccgtctgggaagtgaggtgcgtctctgcctggccgcccatcgtctgggatgtgaggagcccctctgcctggctgcccagtctggaaagtgaagagcgtctctgcccggccgccatcccacctaggaagtgaggagcgcctcttcctggccaccatcccatctaggaagtgaggggcgtctctgcccggccgcccatcgtctgagatgtggggagcgcctctgccccgccaccccgtctgggaggtgaggagcgtctctgcccggccgccccgtctgagaagtgaggagaccctccgcctggcaaccgccccatctgagaagtgaggagcccctccgcccggctgccaccccgtctgggaagtgaggagcgtctccgcccggcagccaccccgtccggaagggaggtgggggggtcagccccccgcccggccagccaccccgtccgggaggtgaggggcgcctctgcccggccgcccctactgggaagtgaggagcccctctgcccagccagccgccccgtccgggagggaggtgggggggtcagccccccgcccggccagccgccacgtccgggagggaggtgggggggtcagcccccgccaggcgagacgccccgtcagggagggaggtggggggtcagccccctgcccggccagccgccccgtctgggaggtgaggggcgcctctgcccggcagcccctactgggaagtgaggagcccctctgcccggccagccgccccgtccgggagggaggtgggggggtcagccccccacccggccagccgccccgtccgggagggaggtgggggagtcagccccccgcccggccagccgccccgtccgggaggtgaggggcgcctctgcccggctgcccctactgggaagtgaggagcccctctgcccggccaccaccccgtctgggaggtgtacccaacaactcattgagaacgggccatgatgacaatggcggttttgtggaatagaaaagggggaaaggtgaggaaaagattgagaaatcggatggttgccgtgtctgtgtagaaagaagtagacatgggagacttttcattttgttctgtactaagaaaaattcttctgccttgggatcctgttgatctatgaccttacccccaaccctgtgctctctgaaacatgtgctgtgtccactcagggttaaatggattaagggcggtgcaagatgtactttgttaaacagatgcttgaaggcagcatgctcgttaagagtcatcaccattccctaatctcaagtacccagggacacacacactctgcctaggaaaaccagagacctttgttcacttgtttatctgctgaccttccctccactattgtcctatgaccctgccaaatccccctctgcgagaaacacccaagaatgatcaataaaaataaataaataaaaaataaataaataaataaaaaagaatatattttattggctgggcacggtggctcgcacctgtaatctcagcactttgggaggctgaagcgggcggatcacctgaggtcaggagttcgagaccagcctggccaacatgatgaaaccccatctctgctaaaaatacaaaattatctgggagtggtggcgtgcgcctgtaatcccagctacttgggaggctgaggcaggagaatcgcttgaacacgggaggcggaggttgagccgagatcgcgccactgcactccagcctaggcaacaagagtgaaactctgtctaaaaatatatttttttaaatttgttttgtatcaagaaaaaaatacgaaaacataactttattgtagcaatctaatgcaggtgtcttttaaaactatcttttatttccagatgggacttgggaatttctttgttttattttttaaatacattatctttcacaaactcggggaggaacaactgttttttaaccaaaaactcctcacccaggaacaagcaaactgcctgagagctgcatctattttgcaatagtgcccctgaagcgcgcacgacgccgcagggtaggcgtcccgctcctgactggactcgtggcacggtcctaaatttgcagagggacccagggaggatcaacccactcgacactggcaatgtccccaccttccctagctgcaaactgaaaccagcagccgagcctcccgctctagaggcgcggcgaggggcgtggccgcggctggggtggggctaggggccgggtcgtgccccccgaaactgggccgtgccccccgcccacctcactgcgcctgcgcccgagggcgcggggcaggctgggaagtagcgttaaggtggtggttgggtgctttgcgggtcacttgttgcgctgcccgcacgtttgtcgcggctcctggatgcctctttggccgcctcgcctgttccggctctcttatctgcccagtcttcccggcccctgccccggaccctcctgcgcgcccctccggctgcctgtgtgcgaccccagcaaccggcccggggtctcgccggcgccgtcaggtcatcgtccacccggcttgttctcagcttaccgagaacgccccagcccctgcgctcctcctgtcttacttgtgttgagtcatttaatccgctttgcaattgagacattgaaacggagacgctcaggaacgtgcttcaggtcacagatccaagatgagttagggcctggaattgagtcgggctgcctgccaccattccaccttgcatgtcacacctggacgaataccctgtgcttcacctaaattcgcctaaattttcactatttctttttattttcttttctttttttttttttttcttgatacaaggtcttggtagcccaggctggagtatattggcgtgaccagagctagctcactggagctttgaactcctggggctcaagtgattctcccgcctcagactcccaaatagctgaggctacaggcgcaggccactacacccggctaattatgacatttttgtagagggggcggtctcactatgttgcacaggctggtctccaactcctgggctcaaaagatctcccacctcggcctccaaaagtgctgggattaccggcgtgagccaccgcatccggcctgttcactatttcttttttcttgactttcttctttttttttttttttcggaggcagagtctcactctgtcgcccaagctgtaatgcagtggcgcaatctcggcacactgcaacctctgcctcccggattcgagtgatcgcctcagctgggattacaggtgcctgccaccacgcctggctaatttttgtacttttaatagaaacagagttttgccataatggccagactgggcttgaactcccgacctcaagtgattcaccctcctcggcctccgtaagtgctgggattacaggtgtgagccactgcgcctggcctgtacactatttcttaatccctgccagggcggtgttatctttgcagctgagagttctaagtgacttgacaaaggacactagcgcaactttaatagcaaagcctgggccatttccaccaccacatgtgtggcctgtgttctttcccacaccttttaaaattttaaacagccttattgaagtgctggtgtaaagcctgtacatatttaaagcatacagtttgccttttacatatgtgtgtatacatccctgaaaccaccaccacaatcaagagaatgaacataaaagtttccttctgctcatttataatccttcctcccagtcacagcctaccgtatcagtccctcagataacagtgaatctgcttttggtcaccgtggattagtttgcgtcctgtagaattatatgttaaggaatcatatactatctgctttttctcagggtagaggacagttactgaggccaaggggtcacttcatgatgagcatagaggccaatactatggcatgagattttgagaaaaggaaagctttattgccagttgaccagcaaggagacaggaggccagatcaagtctatctccccatgctggccttaaggcagtacatttattaggaaggtttaggggatgagttagggatcaacaggtagaaagaaaggggaggtctggaaagtccttgggcatgcacagttgtctcttgatgggttgcatgtgcaaatccaggatgcgagagtgaatatggaacatgctgcggaagttcagactgtgatgtcagcagcctctttctgcacagactccagttggccatgttggttccaactgatttcagccagtttcgttctcttataattaaagggagtttctgcaaaatgtttcttgtcttatctgccatcatgtaagctcaagaattcctggcggggtgtggtggctcacgcctgtaatcccagcactttgggaggccgaggtggctggatcacctgaggtcaggagttcgagaccagctgaccaacatggtgaaatcccgtctctactaacaccacaaaaattagctgggcatagtggcagacgcctataatcccagctgctccggaggctgaggcaggagaatcgcttgaacccgggacaaggttgcagtgagctgagatcacaccaccgcactccagcctgggggacagagcaaaattttatctcaaaaaaaaagaattcctgttagtcacctgtttaaccctttggggtacgatttcacttcttagctctgtgcttgcaaaataattagacatcctgttatcaagaaagtatggccagataaaactggtctggaagttacacagtcaagcttaactattttgaaattcacccatgttgctgaatagatcagtagttcatttcttgtcattgctgagtagaattccattgtattgatatactgcaattttttaaatccattcctccattgttcacttttcagtttctggctataacaaacaaaacttctatcaacatgggtgtgcaagtctttgtatgaatgtacccttttatttggattaatagcagtgaaatggttgtgtcaaacagtgggtgtatgttcaactttttaagaaactgccaaactttttcagatgagatcaggtgtgtttagggtgatatggccatagacccaaactatttttcaaagtggttgttccagaccaggcatggtggctcatgcctgtaatcccagcaccttgggaggctgaggtaggcggatcacctgaggtcaggagttcaagaccagccgggcaaacagggcaaaaccctgtctctactaaaagtacaaaaattagccaggcatgatggcgggtgcctgtaatcccagctacttgggagactgaggcaggagaaccaggaggaggaggttgcagtgagctgagagtacaccactgcactccagcctgggtgacagagtgagactcatctcaaaaaaaagagaaaaacacaaagtggttattccatttcacattcccaccagaagtgaatgagagttctagatccatatgtccaacacttgttagacattctaaaagtatgtagtggtatcttgctgtaggtttaatttttatttatctaatgacattaagcatccttggctgggtatggtggcacacgcttgtaatcccagtactttgggaggccaaggcaggaggattgcttgagttcagaagttcaagaccagcctgggcaacatggcaaagccccttctctattttttttaatttttaatataaaaaaatttatacccagcactttgggatgccaaagtgggcagacggtttgagctcaggagttcaagaccagcctgggcaacatggcaaaaccccatctctacaaaaaaatacaaaacttagctgggcatggtggcctgagcccatagtcccagctactggggaggctgaaatggaaggattacttgagcccaggaggtggaggttgcggtaagccaagatcgcgcaactgcactccagtctgggcgacagagtgagacgctgtctcaaaaaatatatatatataaaattttaaaaagacactaagcatcctttcatgagcctattttccattcatatatatatttttggtgacgtgtgaattcaaatattttgcccatttttaaaattagtttattactattcataaaaatctgggtttcagatttttatgtttaattatctttttttcagatatttgtttaattatctttttttttcgaggcagggttttgctctgtcacccaggctggagtgcagtggtgcaatcacagctggctgcagtctcaacctcccaggctcaatcaatcctcccacttcagcctcctgagtaactgggaatacaggtgcaagccatcacacccggctaatttttgtattttttgtagagacagggtttcgtcacattacccaagctggtctcaaactcctgggctcaagcaatctgcctgcctcagcctcccaaaatgctgagattacaggtgtgaaccactgtgcccagccctcataaatatttccttccctcataaatattttcttcctcataaatatggccttcataaataatgtccttttattctcttaaaagcatatttcaaaagcattcttaatttcaataaagtttaatttgccaatttttttttttttttttttgagatggagtctcgctctgtctcccaggctggagtgcagtggtgtggtctgggctcactgcagccttcaccacctgggttcaagcaattctcctgccttagcctcccaagtagcagggattacaggcacacactgccgcgcctagctagtttttgtatttttagtagagacggggtggccaggctagtctcgaactcccgaccttaggtgatgcacccaccaaggcttcccaaagtgatctgtcaatattttgatttgtagcttttgtctttagtgtcctatctaacaaatatttgcgtaacccaaagattttctcctgtattatatttttctcttgaacttttttttttgtttgttttttaagatggaatcttgctctgtcgcccaggctggagtgcagtggcacaatcttggctcactgcaagctccgcttcccaggttcacgccattctcctgcctcagcctcctgagtagctgggactacaggcacccgccaccacgcccagctaatttttttttttttttatttttagtggagacggggtttcaccgtgttagccaggatagtctcgatctcctgacctcgtgatccacccgcctcagccacccaaagtgctgagattacaggcgtgagccaccgctcccggccttctcttgaacttttctagttctaagttttagaattacatccatgatctactatgttaatttttatatatagtgttagataagggtcaaagttaactttttgcatatagatatccaattatttcagccgtttgttaaaaatattttttttttttctgaattgcctttgccactttgttgaaaattaattgatcacataaatttgagttttttatggaatctccattctgctcattgacctatttatatgtcttgacactgatagcacatggtcttgattatcatagctttatagtaagtcttgaaatcagataagttttgtttgtttgtttgtttgtttgtttttgagatggagttttgctcttgttgcccaggctggagtgcaatggcgcaacctcagctcactgcaacctccgcctcccgggttcaagcgattctcctgcctcagccttccaagtagctgggattacaggcacccaccaccacgcccagctaatttttttgtatttttagtagaggcggggtttcaccatgttggccaggctggtcttgaactcctgacctcaggtgatctgcccgcctcggcctcccaaagtgctggcattacaggcatgagccactgcgcccagccgagatcaaatagttttaatcttccaactatttttttctcaaagttgttttgtctactccatgtcctttgcatttctaaatgaatcttagaatcagcttatccagatcaacaaaaaaagcctactgggatttgactgaaattccagggaatctgaagatcaatatagggcaaattaacaccttaaaaatatggtctttcaaactctatggatatggtgtatatttccatctacttagatattctgtaatttctctcagaaatgttttgtgcttttcatgagcaggccttgcacatctttggtcagattcattcctaagtgtatcatacttttgtgctcttttaaattgtttttgtttgtattttagaaacagggtctcactctgtcacctggctggagtgcagtggcaggatcatagctcactgaaacctcaaactcctggccacaagcaatcctcctgcctcagcctcccagagtgatgggattacaggcatgagccactgtgtccagactatttttaattttttaatttaaaacttatttaaaaattttaatttaattaaaatgtattttaaatttttagttttttgctaatatatagaaacataattgatttttgtctattgatcttgtatcctgaaaatttgcttattagaatagctttttatacattcgataggattttccatgtagacaatcatgtcaactgtgaataaagaccattctcttcttcctttccagtctggatgccttttatttctttttcttgcctattgcactggtttgaacctacagtacaattcagtgggagaatgggtggtcttttcactaaatgagtctgggtcaattagatactaatataaaaaaatgaatcttataaaccaaatagtatctgagataggtctcaatcaatttagaagtttatttttccaaggttaaggacttgagaaaggtccgtgcatttctccaaagatgactttaaaggcttcaatatttaaagggaaaaagcaggctggagggaaaacagggagggaatggtcacgttactaaatccacgtgtcgcaagagaaaaagagcacataagggagtgaatagtcaatcatgttattagtctcctgctcagtaaatcagcactttacataagataaggtgaacaaagcatagctacctgtggagatctttaaccttttatccacagctctctgcttaggaacaaaaggaaagttcgtttcttgcctgattcagctttcagcttaattttttctccttttggcattgtgaattatttttttctgtgtactctcacagaatggaatggcatagtgaattggggtcccaagtttctatttttctttcacaacctttacccctacctaacaccaaacacaaaatttaatttgagaagcatcatcgacctcaatgtgaaaggcaaaccaagaacactgttaaagaaaatataacagatcaggttaatgtgtaagcataggcaaagattccttaaacaggatgcaaataccaataaccatgaaagagtaataatttatagaataagtttcagttgtaaattaattagtaaaatgtgtgtacctcaaaaaacaccattaagaaggtgaaaaggtaagtgacgggccaggagaacacattgcaaaacatgtgtcaaagagccctagtaattgataagaaaaagactggacaaccaatttttctttttctttttttttttttttttttcttttttgagacagcgtcttgctctgtcacccaggagtgcggtggcgcgatctcggctcactgcaacctctgtctcctggattcaagcgattctcctgcctcagcctccccagtagctgggactacaggctcgtgccaccacgcccggctaattttttgtattttttgtagagatagggtttcaccatgttagccaggatggtctcaacctcctgaacctcctgacctcgggatccatccacctcagcctcccaaagtgttgggattacaggcgttagccacgcccaatttttttagaggaggggaggggcagaggcgtgccctgaccttcaccaaagaggatagccacaggccaataagcagaagaaaaggtgtttagcatcattagtccatttgcaaattaaaaccaggacagagatactgttgcagggcatgtggaccccaaaattggggcttaacccaggagggttcttggctttgcccagaagagaattcaagggtgagccggtggtgttagcaacttttcttgaagcagccgtgaataacagcagcagaggggctgctcctgcagagcagggccacccacaggcagtgtgcccagaggagcagctcagaggcagtgctgcagtcacgcttatacacactttaaattatatgcaaattaagggacagattatgcagagatttttagaaaaagcatggtaacttctgggtcatcaggtcatcgccatggaaagggatggtaacttctgggtggtgccatggcaatggtaaagtgacaggccacaccactgggtgtgtcttatggaaagctgcttctgctcagacactgttttagctagtcctcaatttggtccagtgtccaagctccacctgcagggttgagtcctgctccctgtcacaataccactacaaaccaacctgctcaaccccaccatggtgcaaccacttaggaaaacacacggcatctactaaagctgaacatattcactctatgacctagcagctccattcttagtatatatccaacatgagtgctatgtccaccaaaacacatgtatgataatgttcatagaagttttattcataatagccaaaaactggaaacaattcaaacgtccatcaacaatagaatgaataaatagattgtatccatacaatggaatacagtcgtgtgccacttaacgatggatatacgttctgaggaatgtgtcattaggtgatttcatcgttgtgcaaacctcatagtgcacttacacaaacctaaatggcctggcctttacctacctatgctatatggtatcgtctattactcctaggcccctaaattaattgcacaggatgttactgtactgaacactgtgggcaactgttacacagtagtaagtattggccaggtgcagtggctcatgcctgtaatcccagcactttgggaggatgaggcaggtggattgcttgacgtcaggagttcaagaccagcctgaccaacatggtgaaacgctgtctctactaaaaatacaaaaattagttgggtgtggtggtgggtgcctgtaatcccagctactcaggagggtgaggcaggaaaatctgaagccaggaggcagagattgcagtgagccgagatctgtgccactgcactccagcctgggcaacagagcaagactccatctaaaaaaacaaaaaataaaaaaaattaagtgtttgtgtatctaaacatatctaaacatagaaaatgtatagtaaaaatacaatataaaagatttttcaaaaggtacatctgtgcatgacacttacgatgatggagcttgcaggactgaaagttactccgggtgtgtgagtgaatgagtggtgagtgaacgtgaaggcctaagacattactgtacactactctcaactttataagcactgtacacttaggccacactaaatttattttttaatgtttttatttgttccataataaattaattttagcttactgtaactttataagcttttttaatgtttgacttttgtagtcttgtaacacagcttaacacattgtacagctgcaaaaaaaatttctttctttatatccttattccatgaatcttttctatttttattttattttattttatttttagtttttaatataaacacacacataagcccgggtctacacgggatcaggatcatcaatatcattgtcttccacctcaacatctcggcccactagaaggtcttcagggacaataacactcatggagctgtcacctcctgtgatcataataatgccttctggatacttcctgaaggacctgcctcaggctgctttccagttaaccttttttatataagtagaaacagtacattcaaaaataacaattaaaactattgttttaattggcacagtggctcaagcctgtaatcccagcccttggggaggccgaggttgggcagatcacctgaagtcatgagttcaagactggcctggcctacatggtgaaaccccgtttccactgaaaatacaaaaaattagctgagcatggtggcaggcacctgtaatcccagctacttgggaagttgaggcaggagaaccgcttgaaccagggaggcagaggttgcagtgagccaagattttgccactgcactccagcctgggcgacaaaagcaaaattccatctcaaaaaataaaatgagtacggtatagcacatacacatacaaaatgcttatgaaagaaatccaagacttgaataaatgaagagacatgccatgttcatggactataagactcaacacagtaaagacgacaatcagcccgaaaatgatatacaggtttaatgcaattccaattgcattgttactgaagataccgtttgctagagggcatgaagcttttaagtcggcgcagctcatgcacctgctcaatgcagatcttgtcttcttgtacctgagccctctgctgagttaactgctacaaagcttcctgctggtggaatgcctgattctgccttgctggtgtgtgtggttcctgccgtgagtccttctgaacaggccacttgaatcaatgttttttgtttgtttttgtttttgagatggagtctcactccatcacccaggctggagtgcagtggcaagatcttggctaactgcaacctccgcctcctggattcaagcgattctcctgcctcaccctcccaagtagctgggactacaggtgcatgccaccacacctggctaatttttgtttttttttttttggtagagatgggatttcaccatgttggccaggctggtttcaaactcctgacctcaagtgatccacccacctcggcctcccacagttctggaattacaggaataagccaccgcacccggcccgtgaatcaatgtttagttgaatataagaagaccccggtgagcattgcagagtggtggcgacagtaaactaaactttcagtccctacactccatttggccaatgaactatgagatgacagggataaggaaggaaatgtagacgaggctttgaatgcctcggtaggagggtccatttgcccagcccctggtatgagaagctctgcagcccacgatggggagcagatgtgggttgaaatgaaaccaaattcatgctaagaggagaaactgctcagtgttcatgaaggggacccgggtagaaacccacctgcggccgggctgtggggacggattcatgtctggctgggatgggtattgggggtggaaggcgaagacaacggaatgaccctgcagaccccgtgcttgggatgggactaccacttgacaaagcaggggaacggccagactcactccaactcctccaaactccaatttacgggcgagaaacgtttgggaacccccaagaccctgtagagccaaagcagacaggcaaggctacaatggcaacagtttagtaggatttggtgaaatcccattaaaacgttcaagaaagctctccgcgtgtgggaaggggtaacctaaacagcatccctgagtctgaaaagctatgggctaagggtgcacaagtcaattgaaccctgtgttggagtcggaccagtgtcctctgccgccatctagtggaaatacacaggaatgcggacattttctaaagtgacagattttttaagcagtcataaattattgtttattttaaaggtttaagccataccttaagactggataaaacccttcatttacatatggcagacagagggaaaatacactttttataaaatgcttaaacaactttcactgtagtaagttggtttggttaaaaactatcatgtgatatcatttgatgtaaaatatctaggccggaaaaaatgtatatatatctaggccgggcacagtggctcatgcctgtaatcccagcactttgggaggctgagacgggtggatcacttgaggccaggagtctgagaccagcctggccaatatagagaaaccctgtctctactttaaaaaaaaaaaaaaatagcggggtgtggtggcacacgcttgtaatcccagctactcgggagactgagacatgagaatcacttgaacccaggagggggaggttgcagtgagctgagatcgcgcctctgcactccagcctgggtgacagagtgagactccatcagaaaggaagagaagaagagagaaggagagaaaagaagagagaaggagagaggaaagaaagaaaaagaaagggaaagaaagaaaagaaaagaaaagaaaagaaaaaatgcttagaattcacggaataaaaggagtattgcatgcattataaaaactaatggcaaaaactatttcagttgcccagcatatggggggacatcccattggggaatagaaatagaaatacaaatcctgatgatcaccaaatgtactaacttgtttttttgtttgtttgttttttgtttttctgagacagtctcactatgtcacccaggctgaagtgcagtggtgtgatcatagctcattgcagcctcaaactcctgggctcaagcagttctcctgcctcagcctccccagtacctgggactacaggcgcatgccaccatacctggctaatttttttgtagagacagggtctcatcatgttgcccaggctggttttgaactcttgggctcaggcaatcctcctgcctcagcctcccaaagtgctggaattacaggcatgaaccaccgcacccagcctgaacttgtccttttttgttaaaggtgttaaccaaagtcttggaggtacaccactggcaaaagtttaacaaaatgcttctgcatgagaatctaaccttagggttagttccctgaaagcatgtgtcaactacgttgctaggcaacattgcttagagtaaaaatgatcattggtaccttgtacctggaatcaccaggtagtcgtatgtggtatttataccagtttttgctttctgagtgtggaatttttgtaactgggcatgtcccttgcagagaccctggaagctatgtttatggaattgttatgggatggtctcctgtgaggcatcgggcttttaaatcaggaacgctggaagcagtggctcatgcctataatcccagcactttgggaggttgaggtaggaggcttgtttgagcccaggagttcgagactaacatggggaacatagtgagactccatctgtacaaaaaaaaaaaatttaattagccaggtatggaggcatgcacttgtggtcccagctactggggaggctgaggcaggaggagcgcttgagcccaggagttagaagctgtgatgagccacgattgtgtcactgcactccagcctgggtgacagagtgagaccctgtctcaaaaaaattgatgaagccatcatttagggcagctctcctaaaggcccagtgtagatctcgcctgtctccttgtatctactgagtgaactgcatcaaggacactagattagaggaatgactacctgaaggaagccgctttgataacagctagggcccctgcgcttcatccttctaaatactctgaatgtgactcctggtcatctcgtgagtttgaataagcccaagaagaccactagtggggattgcataagttacatcagccaaaatgattcttcttttcttttcttttgagacagagtctcactctgtctcacaggctggagtgcagtggcccaatctctgctcactgcaacctccacctcccgggttgaagtgattctcatgcctcagcctcccaagtagctggcattataggtgcctgtcaccacactcagctattttttgtatttttagtagagatggggtttagcaatgttggccaggctggtctcgaactcctgacctcaagtgatctgctggcctcagcctcccaaagtactgggattacaggcatgagccactgcgctgggccctcttttgtcttctttaatttggaatgcttctttaactttttttatttttcctttcatgacatggacattttgaagagtacaagcctattgttttagtagaatgtccttcaatttcgctttgtctgatgtttcctcatagtcagattctgggttggggcttcccctactttagggaagtccactctgataccctccccaagccttgctctcaagttcacagccaaggggtcaaacccattggagtctgcccactgccaccttctggagcacaggttggcaaattttttctctgaaggaccagagagtaaatattttaggatttgcaggccaagtggtctgtgtcacaatttgactttgccatcgtagcctgaaagcagctacagataacacataaatgaattagcatgactatattccaataaaattttatttacaaaaaacaagtgaagggccagatttggcccctgactctaacccatgtcccagcccccaaaacctccagagttccatgcccaaacagcctccagtctgtttccagggtaggcctctctttcctgcatgctgtatcctgaggggcatcatattgccatgtgggtgtatgttttccctagactaagaggtggctgggttttgttttgctttgtttgagattgagtctggcgctgtcgctcaggctggagtgcagtggcacgatttcagctcactgcaaccgccgcctcccaggttcaagtgattctcatggccttgtcagccactgcacccggccaaggtggctgttttgagggcagatgtggatacacaagctgaagtgtctgcaagagtgcaggtgaagattcaaggaatcctcccaccgcagcctcccaagtagctaagaccaaaggcatgcgtcaccatgcctagctaattttttaaaaaatttttagaggccgggtgcaatgcctcacgcctgtaatctcagctctttgggaggccaaggcaggcagatcgcttgaagtcaggcgttcaagaccagcctggccaaaatggtgaaaccccatctctaataaaaatacaaaaaaaaaaaaaatagcctagcatggtggtggacacctgtagtcctagatactcagcagactgaagcaggaaaatcacttgaacccaggaggcagaggttgtagggagccaagatcacgccactgcgctccagcctaggcaacagcgtgaaactccatctcaaaataaataaataaataaaataaaaaataaaaataaaaataaattgttttggccaggcacagtggctcacacctataatctcatcactttgggagactgaggcaggcagattgcttgagcccaggagttcaagaccagcctgggcaacatggtaaaattttgtccctaaaaaaaaatttgcttttcctagctggcacaggccaggtgtggtggctcacggctgttatctcagcactttgggaggccgagatgggcagatcacttgaggtcaggagttcaagaccagcctggccaacatagtgaaacactgcctctactaaaaatacaaaaattagccaggcatggtggcacacacctgtaatcccagctacttgggagtctgaggcagtagaattgcttgagcccagaaggcagaggttgcagtgagaaaagattgtgccactggactacagcctgggtgacagagcgagactccatcttgaaaaaataaaaaaaaattagccaacgtggtgatgcatgcttttagtcccagctattcgggaggctgaggtaagaggattgcttgagcctaggagttcaaggctgcagtgagccgtgattgcatcactgcactccactctgggtgacagagcaagaccctgtcttgacaaaaaaaatgttttttaagtttttgtagagacagagtctggccatactgcccaggctggtctggaactcttgggcttaagtggtcctcccacctcagcctcccaaagtgctgggattatacgtgtaagccaccagcccagctacaattctaatttttcttttcttttctttttttttttttttgagatgaagtctcactctgtcacccaggctagagtgcaatggtgtgatcctggctcactgtaacctccgcctcccgggttcaagcgactctcccacctcagtttcccaagtagctgggactataggtgtgcaccaccaggcccggctaatttttgtatttttagtagaaacagggtttcaccacgttggccaggctggtcacaaactcctaacctaaggtgatccacccaccttgccctcccaaagtactgggattacaggcatgaaccaccgcacctggcctagaattctaacttttagacatttagacacatggtatgtcatctccatttgcactttgcccctgcccataatgcaaggggcagcctgtgtgaaagcacaaacgcttctcagaacagccttagccaggctggcctggtccccacagatgttcaccagggaagggagtctgcaggctggcttctatctccacatctcccctgggagagtccggagcaattcctgggccatgcctcccagcctccccttgcctgcagccactcagctcagcaccagaccccagccttggtgctcagcttctcaacaacagagcagagaagaccccaaactggccagttcctccgtcttcccaccctctacttctggaatctcttttctctttccttcttcctttttttaatatacatttaaggggtataagtgcagattccttaaatacatatatttcgtcatagtgaagtctgggcgtgtagcgtacccatcacccgaataatgaacaatgtacccaacaggtaattcttcaaccctcatccccctcccactctcccacgttctggagtctccaatgtctattattccactctgtatgtccatatgcacccattgtttagctcccacttataagaatacacagtatttcactttctgcttctaagttatttctgttagaacaatggcctccaggccaggcatggtggctcatgcctgaaatcctgcactttgggaggccgaggcgggtggatcacctgaggtcaggaattcaagaccagcctggccaacatggtgaaaccctatctctactaaaaataaaaaaattagccagacatggtggcccacacctgtaatcccagctacttgggagactgaggcaggagaaccatgtgaatctgggagacggaggttgcaatgagccaagatcgtgccactgcactccagcctgggtgacagagcaagactccatctcaaaaaaaaaaaaaaccaaaaaaaacaaaaaaaataacaatggcctccagctccatcccatgtggctgcaaaatacatgatttcatccttttctagggctgagtagtattccatggtgtacatataccacgttttctttatccagtcctccgctgatggacacttagattgatccatgactttgctattgtgaacagtgctgtaaggaacatacgagtgcaggtgtctttttgatatgatttatttccctttgggtatttacccacagttggtttgctggatggaatggtagttctattgttagttctttgagaaatctctatactgttttccataaaggttgtactaatttacattcccactaacagagtacaaacattcccttttctctgcatctttgccaacatctgttgttttttgtggaatgtcttttctttatagtcgatctaatttcctttaacctcttgatatatgaacaacaaattcatcccttgcggcagcattaagacctttggaggtttcctgctctcctctcattcactgaacacacacaccaccaccaccaccccactaccatgactaccccatctctgccatctgatcagcacagggcctgaaggcacattccctgtacccagagcactatgaagcaacacaatgttgtaggagttaccatcctaccaacactactgcacgctcacgtccaagatgctttggaattccagctaacaaagtaacaccaatatggtacccaggtcgcataagcactcaagtgtatccagaaagatgagcaattctttttttttatatatactttaagttttagggtacatgtgcacaacacacaggttagttacacatgtatacatgtgccatgttggtgtgctgcacccattgagcaattctttaaaatgtgatcccatgaaatatttctaacttttcacaatctcaaaaagtaagtgacagctattgctctaaatatcactttcaataatatagtacttgtagcaaggcatcctataattttaagagctacataatgtaaattacgtaatttacataattattataatatagtaactgttcttttcattattttgctcagtgtttttacttttatcctaaaattgctttccataaactccaaaagttgtttcttttaatactttcagtctctagagaaaaagcaattttatgaaagtgttttgcaataatatattgattaattactctatcattttatttgccaatagttaggcccattccttagcataatttacttatttgtctcttcattgactcaggccaccatcagaacacataattattcatgataagaagttgggcaaagcaggaattttgcacacaaagaggtagagccgaatcagatattgagtacattaatttcttttgtaactgggtgctgtaataagagagctgaggcttggactttaaaacttgtggtacaaatcttgacccagccgtcaaccacctcaagtcaagactatcaccttccccagcccttagtgcccccactatcgagagaggaacttggtgatactggttcctgtacaacacaggtagtatgacgatcaagtgataaaatgcttataagagagcattaataccagtgacatcaatgtgctagttgttatctcatgacatgcaaagtcttctcattggatcatgattcccaatactgtcatggcattgctttcctttgacagattgtgatggttggtttttcatgacaacttggctaggctaagggatgggcagatcactggtacaacattatttctgggtgtgtctgtgcagatgcttctggaatagattagcatttgaaacaggtgactgagtaaagattactctcacccatgtgggtgggcatcatccaatctattgagaccctgaatagaacaaaaagacaagaggccaggcatagtggttcacatctgtaatcccagcattttgggaggccaaggcaggaggattgcttgaggccaggtgttcaagaccagtctgggcaacagagtgagatcttgtctctacaaaaaatttaaaaattagtgtggcgtggtggtgagatgggatttgttcccttgaccttcacccccttcatgggcgagaactggagtggctcatttcgctcagcctgccgctggccactccttgcaagagggagcgtgtgagcaagcgagtgtgggaaccagagggaacaaacgctagaaccaagttctggcgggagcaggctctgtatgggcctcacagcagcatccaagcccctgcccttttcgcacccaggttcttgtccggcatccaggaaggatcaggttgcatgaacggattgaagggtagcatatgtggggtatcttactgggtgatggaagtggctctcagagggatgggaattggaaaggggatggtgcgggaagaaggtgatcttcccctgaagccacaccatctgaagttagctgtgtcttgcagagatccagccactgcactccagcctgggcaacagagcgagtctccgtctcaaaaaaaataaaataaaataaataatttcaacagaattattaaagatgttaaatagccaggtgcagcgattcatgccagtaatcccagcactttggaaggctgagacagcaggattatttgaggtcaggagttcaagaccaacacagaaagaccctgtctctaacaacaacaaaaaaaaatttagccaggctcatgttggtgtgtacttgtagccccagctactctgaaggctgaggcaggaggatcacttgagatcagaatttgaggccacagtgagttatgactgcactactgtactccagctcaggtgatagacagcaagaccctgtcattaaattaaaaaaaaaaaaaaaaagatgtaaagtagagggtggacccaaaggacaaatactgtaggaccaataccacttatatgaggttcccagaggggtcagattcacagccacagtaggcaagatggtggtttccaggggctgggggaaaggggaatgaagagttattgtttaaattggtactgaattttatttgtgtgtttgtggctttgttttttgtttttgctttgtttttgttttgttttgttttgttttgagatagagtctttgtcacccaggctggagtgcggtggcatcatcttggctcactgcaacctctgcctcccagattcaagtgattcttgtgccttggctgccccagtagctgggattacaggtgtgcaccatcgtgccaggctaatttttgtatttttagtagagacagcatttcaccatgttgcccagactgatctcgaactcctgagctcaagcgatccacccgcctcagcctcccaaagtgctggccgtgcctgactggggatagaattttagtttggggagatagaaaagttctggagacagatggtagtcatggttgcacaataatgtgaatgtatttaatgccactgaactgtacacagagaagtggttaaaatggtgatgtttatgttatgtgtattttatcatacgcacacaaaaataaagggtagcagtaatggacgaagtgaagcagaggctgacggggactggaatggccatggaggggaggtggagaggggaatagcagccaagcagggagcaacccatactttgggaccaccaagtggctcatgccccataaattcccagtagagcaaagggtagaagtaagacatggagtggaatcttcctacaccctgaccctcacccatctcacacagcagccatgtagtagcttgacatgcacccgccccagaaaagttgcaggggttcttctgttaaaaaaaaaaaaagaggctgggtgcggtggctcacacctgtaatcccagcactttgggaggccgaggtgggcagatcacttgaggtcaggagtttgagaccagcctggccaacatggtgaaaccccgtctctactaaaaatacaaaaattagccaggcgtggtggtgcacacctgtaatcccagctactcaggaggctgaggcaggagaactgcttgaaccagggaggtggatgttgcagtgagccataatcgcaccactacactgcagcctgggcaacacagcaacactctgtctgaaaaaaaaaaaaagcaaatgtcttaaaacacccacaatctgtcattggaggttcaccaatgtctagagaatggcttccttcctgatcaccctaagtgaagtcctccagtgaatgagtccactaaaaatacagaggccctcaacaaatgatttatgacatcgttctcacatacattccaatatggtgactttgatgaaagtctccaacatgcaagactcacactaagatatgcaagcaaaaagcaggacgaggaggcagggacatcttcatgctatgtaactgtcagcacagccaaacccacgcatagtcagaaccagtagcacatgtgcataacgggcccaccctaccatgcacacagcctggacagcaggcctgcgtggagcaaacaaagataactcaggaatagaaaagaactttaaaatatctctatgtacttggcctgtgagctaaatctgcatttatcatagctggaaatcaatagacaatctccaaaatggatgaatcaagaactggtgataatgggatactactcagccattaaaaaaaaagaaattgtgtcacttcacatgcaaccccagcactttgggaggccaagatgggaggattgcttgaggccaggagtttgagaccagcctggacaggagagggagacctctgtctctaaaaaaagaaaaagacatcatgtcttttgcagcaacatggatggaactggaggccattatcttaaatgaaacagctcagaaacagaaagaaaaatgctgcatgttctcacttgcaagtgggagccaaataatgtgtacacatggacataagtgtggactgatagacactggagactaggaaaggtgggaggctgggaggagagtggatgatgagaaatgaacaggtacaggttgggggcagtggctcatgcctataatcccagcactttgagaggcctagttgggtggctctcttgagcccaggagttcaagactagcctgggcaacagggcaaaaccctgtttccacaaaaaatacaaaaattagctgggtatggtggtgcatgcctgtagtcccagctacttaggaggctgaggtgggaggattccttgagtccaggaattccaggctacagtgagcagagatcatgccactgcactctagcctgggccacagagtgacagcctgtctcaaaaaaaataataaaaacaaaaaataacaggcaaaatgtactttattcagatgatgggtacactaaaagccctgacttcaccattattcaatagatccatgtaacaacactgcacttgtacccctaaaattaacacaaatttaaaataggaccaggtgcagtggttcaggcctgtaatcccagcactataggagacagaagtgggtggatcacttaaggtcaggagttcaagaccagcctaagcaacatggtgaaagcctatctctactaaaaatacaaaaattagccaggcaaggtggtgcatgcctgtaatcccagctactcgggaggctgaggcacaagaattacttgaacccaggaggtagaggttgcagtgagcctagatgggtgacagcgagatccatctcaaaaaaataaaataaaataactagtgatgtaaccctattatttccatgcaacaataaccaccaggagaaacagctgaaggaactaaatatggttgcctccataggaccacggctggggagagagaggccggaatgatctccatgcatcataaaccctcctgcataatttgattgtttaaccttatgcatgtattagtgatactttgatttttaaaaaaattgttccaaagaaaatgactagaaggttttttctcctacagcactgtttcattctggaatcttccaattaagcttttggctaaacacataaatatgataatgatgattattcaggaatcagaaggtttgtaaaaacattgtaccattagagtaatcaagctctgctctaacacatcttggctttttgggataattagaccacactggaggcccagatggggtgaatgagaaagccatgggtatctgccacagagtaacaagaaaaccgtacacaaacctactcagctggtagtttgaaatctgcatgttaacttagtacacaaggagaaaggaataaaaatacttggatttagggcaaaacatttcactttaaaaactaagcatagaacatgagtgcagtaattaatgtcctacataacttattttaagcccttgtgttaaaattgactcttttgggtgaggggaggggacaggtctcactctgtcccccaggtaggagtgcagtggtgcaatcacagctcactgcagcctcgacctcccaagctcaaatgatcctcctgcttcagccccccaagtagctgggactacacacatgcaccaccatgcctggctaatttttgtagagacggggttttgccatgttgcccaggctgatctccaactcccgggctcaagagatctgtccgccttagcctcccaaagtgctgggattacaggcatgaaccaccaggcctgacctaaaacaaaatctttaaagctagaagtgatttcttctatacgttccattttttaaaaaattcacctcctactgtgagcacaatacaaaaaaaaaatttaacctattaattcatctaaccaagatttattgtgttcctactctgagccaggtcaagttggcactaagaatgcaatggtgagaccaggcacggcagctcatgtctgtaataccaggactttgggaggctgaggtgggtggatcacctgacgtcaggagttcgagatcagcaactatctcagacagcagatctcagcagtgagaagtctcccgaactgaaaaatatctaggctgagctgcagtgagaaggcttgacggggagaatctgggagaagtttcatgtggtttctggaatacaggacaaaggcttggaggggcgaggcacagtggctcatgcctgtaatcctagcacttgggaaagcggaggcaggcagattgcctgaggccagaagttcaagaccaacctggccaacatagtgagactcacctctctatttatatttaatcatattatatgataatgaaatggtttggacctgtattcccactcaaatctcatgtcgagttgaaatcctcaatgttgtaaggggggcctggtaggaggtgatcagatcatgggggtggtttctaatgggtttgcaccatccccctagtgctgatctcatgatagagttctcaagagatctccatggctgtttaaaagtgtgtgagcggtggttcctgcctgtaatcccagcactttggtgggtggatcacttgcggtcaggagtttgagactagccttggtaacaagatgaaaccccatctctactaaaaataccaaaattagctgggcgtggtggtgggcacctgtaatcccagctacttggcaggctgaggcaggagaatcgcttgagcccaggaggcaaagattgcagtgaaccgagattgcgccactgcactccagcctgggccacagagtgaaactccatctcaaaacaaaacaaaaattgtgtgacacctccccccaccattatttctgctccatccacgtaagacacgcctgcttccccttccccttccatcacagctgtaagttccctgaggcctccccagccatgcttcctgtatagcctgcagaaccatgagccaattaaacctcttttccttataaattacccagcctcaggcatttgtttctagcactgtgagaatggactaataccgacaatataaaaaatatttttaggccgggagtggtggctcaagcctgtaatcccagcactttgagagggtgaggcaagccgatcacctgaggtcgggagttcaagaccagcctggccaacatggtgaaaccctgtgtctactaaaaatacaaaaattagctgggtgtggtggtgcacatctgtaatcccagctacttgagaggctggggcaggagaatcgcttgaacctgggaggcagaggttgcagtgagccgagattgcaccactgcattccagcctgggtgacaaagcaagaatccatctcaaaataaataaacaaatattattaagttaaggcttggagggagtagagagacagaagcggggaaggtaaacgggagagacaaaaggcgagaccagagatttaagcaagtgccaactcacacaggattttgtaaacaacataacccaggatattccaagagaaaagagcaaggagaagctattaaagccattgaaggctttggggatggggggaagtacaacagactgaatgtttatgttcccctaaaattcataaattgaaatcttagccctcaaggggatggtattgggaagtggggcctttagaaggtgactaggtcatgagggtcaagccctcatggataaaattagtgcctttagggtcgggcgctgtggctcatgactgtaatcccagcactttgggaggcctaggcaggcggatcacctgagatcgggcattcaagaccagcctgaccaacatggacaaaccccatctctactaaaaatacaaaattagccaggtgtgatggcgcatgcctgtaatcccagctattgaagaggctgaggcaggagactcgcttgaacccgggaggcggaggttgcggtgagtcaagatcgtaccattgcactccagcctgggcaacaagagtgaaactccgtttcaaaaaaaaaaaaatttaatgcctttataaaagagattctggccaagcatggaggctcacaaatgtaatccctgcactttgggaggccagactgggagaatcacttgagctaaggagtttgagaccaacctgggcaatatggtgaaacactgtctctattacattttttttttttttaatagcagggtgttgtggtgaatgcctgtagtcccagtgactatgcacgaggctaagacaagaggattgtttgagcccagaagtttgaggctgtcgtgagccatgatcacaccactgtacttcagcctgggtgacacagcaagaccctatctcaaaagagagagagacggccaggcgcggtggctcatgcttgtaatcccagcactttgggaggctgaggtgggaggatcacttgaggtcaggagttcaagaccagcctggccagcatggtgaaaccctgtctctactaaaaatacaaaaattagctgggcctggtggtgcatgcctatagtcccagctactcaggaggctgagacaggagaattgcttgaacccaaaaggtagaggttgcagtgagctgaggtggagccactgcactccagcctgggtgacagaacgaaactctgtctcaaaaaaaagagagagagacccagagagatcccttgcccctttctccatgggaggttttagcaaaaagacagccatctatgaaccaggagacagtcctcaccagaaactgaatctgtcagccttaatcttggacatcccagcctccagaactatgagaaataaatttcttttgctgataagccaccggtgtgtgatattttgttacagcagcccaaatggactaagatgtggggtgggcagggagtcttgagggacaggtttggcatcatcaaatttgctttagaaatattattttcaggctgggcgtagtggctcatgcctgtaatcccagcactttagcaggccaaggccagaggatcacttgaggtcaggagttcaacaccagcctggccaacatggcgaagccccatctctactaaaaaatacaaaaattagccgagtgtggtggcacacacctgtagtcccagctactctggaggctgaggcaagagaattgcttgaacccagaaggcagaggttgcagtgagccgagatcgcaacactgcactccagcctgagcaacagagagagactctgtctcaaaaaaaaaggaatttttctttactcagaaaaattaattatagattagtttccattattttgattactttccaatcatacatatcttatcaatttctattgttcgttgttagggtagttggacaaatatttgagaaacggtaaggataataaaactaattgtagaatgctattaagtttacaaagcacttagtcatgcttttactgcatttacttaggaggcagatggtatagacagatttgcacctggtgccaccattcttctgccctgtgtccatggaaggcactggtaattgatcacggtacaagctcctgatgtctcagacacaatctcagaatccttctcaacacaaatttccaggcaagcagtgtcatctgcttaagttgtcacttgatgaaaaattatatttgccatcctaaaatggtttaaagcacccacattgtggaattataacaacttgattgaaatccacgacttccaccttaatactagatctaagttacttgacttctgcttttgagttgggagggtgtgtgtgtgtgtgtgtatgtgtatggtttttgtttcattttttttttgagacagaatctcactctgttgcccaggctgaagtgcaatggcgtgatctcagctcactgcaacctctgcctcctgggttcaagcaattcccctgcctcagcctcctgagtagctgagattacagacatgcatcgccacgcccagctaatttttgtattttagtagagacagggtttaaccatgttggccaagctggtctcgaactcctgacttcaagtgatccacccgcctctgcctcccaaagtgctgggattacaggcatgagccaccttgcctggctggttttcgttttttgtttttgggggttttttttgagacattctcgccctgttgccaaggctggagtgcagcaccacgatcacagctcactgcagccttgacctcttggtcaagtgatcttcccagctcagcctcctgagtagctgggactactggaatgtgctaccacgtacaactaattttgttttatttttgaagagccagggtctcactatgttgcccaggctggtctcgaactcctggactcaggcaatcctcctgcttcagcctcccaaagtgctgggattacagtcatgagccaccatgcccagctagttttctcattttaaaattagacataaagacatgtaacagagggctgctctaactaaattaagaagcagcaaactatgaaattttaccatctatgtatttaactataccaattcaacgatcctgccttggcaagagagagtaagagaaagataggaattagtaacaattccactcaatgtgcatgcaccccagagcacgtatgggatgggcgacaccttccctagcaatggttattagtctcagtttcagagtgtctctcacagaataagaggttcacccagtgagagtgggtctgttgttcgaagggacatattttccaaaacacatggcccccaaatgcaagccaagagcattatatattgcttaaatgaaggaccagcagtctatctctagagaaaaaaaactagctaggaggtcctccctaaggatataacagatatgttcctaatggatttaaatatggccaaaggctgggtgtggtggctcacacctgtaatcccagcactttgggaggccaaggccggtggatcacctgaggtcagaagttcaagaccagcctggccaacatggcgaaaccctgtctctactgaaaatgcaaaaatgagccaggcatggtggtgcatgcctgtaaccccagctactcgggaggctgaggcaggagaattgcttgaacctgggaggcagaggttgcagtgagcagagattgtgccactgcactccagcctgggcaaaagagtgagactccatctcaaaaaaataaataaataaaataaaaattaaaaatgaatatggccaaaaaaatctttcaaattcctcttccaattaggctgtaaatatctaaataagccaccagttttgctgtaaagatgggggaaaacagataaagtaaaatatcatactgatttttcagatgtctataaaatagtctaaaggaactaaattctagagaaagaggacaaggcttcataggtaggaaaaattagggatcattgggggcatttgccaagtctgggcatgggcaggcagaggatgggccctgccacagaggatggggctctccttggctaagaagaaaccactgattctttaaacatctctacgggctggagcaacagatggaaatatctaagaactcaaaacacagtgctagtcttccatttttgctaagtgggttacagtgcaggaggctgggtcttctgtcttcctcattgaaagacagacagaaaactccactaattcttcatgctcaggtccaaaattccactagaagaaggggcccacaagacacgcagatcacatcttgcccttaagacatttaaaatccaggtgaacaaaaactaactaaatctgcaattcatccaaccccaattcagctccactgttgattggatctgactgatcaagctcctcatcctaattgactggcaagaggaaagggcttgccctctccagggaaaaaaatatttacttccgtcactttggttctttacaatgtctagaatacagtatctagctagacacaatatctggcataaaattaaaaattatgagatgcaaagaagcaggaaaatgtgatgcataatcaagagaaaaaacaatacatgcagattcttatatgattgagatgctggaactcacagataaggactttatgataattactataaatatgttaatgaaattagagcataaaatagacaaaatgataagaagatgaagattttttttttttttttggagacagaatttcactcttgtcgcccagacaggagtgcaatggcatgatctcggctcactgcaacctccacctcccgggttcaagcaattctcctgcctcagtctccccagtagctaggattacaggttcctgccaccacacccagctaattttggtatttttagtagagatggggtttcactgtgttggccaggctggtcctgaactcctgacttcaggtgatccacctgtcttggcctcccaaagtgctgggattacaagcatgagccactgtgccaagccaacaagatgcagattttcaacagaaaaatacactctctttaaaaagatagctggacgtggtggtgtgcacctgtggtcccagctacttgggggcgctgaggtgggaggatcccctgagcccaggaggttgaggctacagtgggctgcgctcgcaccctatactccatcctgggtgacagagcaaaagcctgtctcaaaaaattaaaaaagagagaaatccattaatctggggatcaagtgtactaacactaaggtgagatgcaatctcaggataagactttggagtattgtttaccatatatacattttgtttgtttgtttgtttgtttgtttgtttgaaacggagtctggctctgtcacccaggctggagtgcagtggcgccatctcggctccctgcagctccctgcttcccaggttcaagtgattctcgggcctcagcctcctgagtaactgggataacaggtgtgtgccaccatgccctgctaattttttgtatttttacagtatctcattgtgttggccaggctggtcttgaactcctgacctcaagtgatctgcctgcctcggcctcccaaagtgctgggattgcaggcataggccaccacgcccagtcactatatctaatttttactggtttccagaaagaactaatcgtgctgttccaagaagtgaagttagccaacaggatctacttcctctttcaatccaaggccacgctcctcccagacaaccccagccaacgacagaacacaacaggggtactagggcctaaccatttctgttccaaagagccatcttcactccagggcttcctgttgggttggccaagacgttgtcagatctgcagtacggtctggggctctccctgctcaatcctgcttcttctccgttttacctttctcaggcattacctccaataaacctcttaactctggctcagcatctaattctgagaagaaccaacagacacacatggctttagaactcaacctgtggactggcctcccaaagtgcctgtaatcccagcactttgggaggccgaggcatgtggatcacttgaggtcaggagctccagaccagcctggccaacatggtgaaaacccgtctctactaaaaatacaaaaattaggtgggtgtggtggtgcatgcctgtaatcccagctacttgggaggctgaagcacgagaatcgcttgaacccaggaggtgtaggttgcaatgagccgagatcatgccactgcaccccagcctgggccatagagtgagaccctgtctcaaaaagaaaaaaattcaacctgtgtaagatgtgtctcctccaatgtgtgtaagatgactgacccaataccaagcacaaagtagactttgtgtactttacaaagtatacaataccagtagatgttagatatctttgccttttgcatcatttaggatatgtgtttgctggtcaggagagactcaaaataacactgccacaaatagtgtcacaaaattcctggacttctagctgatcctgtgaaatagtcagataagtgagtaaagccatcttggaccctctagaccaggcaagctgccctcaatgattccagttgaggctacacggaactgaattgcttagtcaagcctgatccatgaaattgagaggtataataaagtgataattgttttaagtcactgaatttgggggtggttcctataaacagaacacatctcctaactaatacagagacaaaaacttaccttaaaagtttatatctaggccgggcatggtggctcacgcctgtaatcccagcactttgggaggccgagacgggcggatcacgacgtcaggagattgagaccatcctcgttaacacggtgaaatcccttctctactaaaaatacaaaaaattagctgggcatggtggcgagcacctgtagtcccagctacttgggaggctgaggcaggagaatggcgtgaacccaggaggtggagcttgcagtgagccgagatcgcgccactgcactccatccagcctgggcgacacagcgagactccatctcaaaaaacaaacaaacaaacaaaaaattttatctaataccatggtaccatagcatttggaaattactgctttcctcctttattttcatatgttgtttgttttttttccttttaagaaagtctttatactcacacaattctgtattcagcttttttacttacatattatttcaaaagcaagtgcctgtttttgctacataaacttagtttttaatagggccattttacatggaaagtttgcctttttgagatagaattcacatatcataaaattcactctttttttttttttttttttttttttgcgatggagtcttgctctgtcgcccagactggagtgcagtggcgtgatctcggctcactgcaacctctgcctcccaagttcaagcaattctcctgcctcagcctcctgaggagctgggattacagacgcccgccaccacgcccagctaattttttttgtatttttagtactacgttggtcacgttggtctcgaactcctgacctcgtgatctgcccacctcagcctcccaaagtgctgggatcacaggcttgagccaccgcgcccggccctaagttcactttttaaagtatacaatttagtgggttttcgtatatccacaaagccatgcaaccattatcattatatacttccagacattttcttttttctttccctttttgagatggagtttcactcttgttgtccagactggagtgtaatggcactatcttggctcacagcagcctccgcctcccggattcaagctattctcctgcctcagcctcccaagtaactgggattacaggcgtgcgccaccacgcctgactaatttttttgtgtttttagtagagacggggtttcaccatgttggccaggctagtcttgacctcctgacctaaggcgatccaccagcctcggtctccgaaagtgctgggattacaggcacaagcccctgtgcccatcctacttccagacatttttatcaccccagaaagaaaccctgcgccccttggtagtgacttcccattcctactcctcacccccatgtcccagccccttgcagccactaatctactaatattttctgcctctgtggatttgcctgttcttggtgtttcttttttttttttttttttttttttttttgagacagagtctcgctctgtcgcccaggctgcagtgcctctcgagtagctggaattacaggcatgagccactgacagtgagcttatcctttttccatctgtaacaatttccaaatgtacacctccatttcagatctcctgacttttagggtcataccaattatgaaatagacgcaattgcttggtgtcccaacaggcacttccagctcaacaagtgcaaaattatttgcatctattagtatttccatcctccccccaaataaacttccttttatccgttctccttatgctcatcactagccctaggactgacctaggtgttcagtcctggaactaggagtccttatctggctacacccaatcagtcaccaatctgttagattctactttatgttttgcaactcatggtttcctgcaccctagggcggcaggaactatgtataatgcagctgatcagttggtagcccctagtgtaatatgcacattaatctccgtttcatgtactagaaacaaggttgagaaccgtgacacattttatgaccatcgcaggcttcctaaagatccaaaatccattgttgcttccctgcttaagagctcccggcaacctgcagaaaaactaaattcttccccattcatgttttcagcagtagaagctctagaatttctacacttgaggagctatggggtaagaaagaagatctggaggatttgcgaggcttgtccaaagcaattcccagctagtacactgttttttccttatatttgtctttactttatgaggctaggggatggctgttggacaatatgggagaaacaaagccctcaaccctcaccacctttggtgtggccactgctatccactataactcctaatatactctgcattctttaggctgtggccacactgaattgcttactttccagaatgcatctcactcttcctcctgtaatcactccatctcctgtttgatctgaaagcttcttaatcccatctctatttcaggcaagatttgaagtccccctcataccatagacaaaaattggctcaaaataaatcaaagacctaaatgtaagagctaacacataaaacttagaagcaaacattatgggtaaatatttgtatcctggattaggcaatgctttattgcatatgacaccaaaagtgcaaacaacaacaacaacaaaaatgaataaactggactttataaaaattaaaaacttttgtgcttcaaaggacactatcaagaaagtgaaaagacaaccaatccgctgaataagagagactatttacaaattatagatctgattagggacttgtatctagaatatataaaagaactcttgccactcaacaataaaaagaaaaattgcccaatttaaaagtgtttagctgggtgtggggctcaacgcctgtaattccagcactctgggaagccaaggcgagaggatcacttgagtccaggcatttgagaccaacctgggcaacatggcaaggccctgtctctacaaaaaaatacaaaaattatctgggcatggtggtttgcacctgtggtcccagctacctgggaggctgaggtggaggattgcttgagcccaggaaggttgcagtgagccatgatagggccactgcattccagcctggatgacagagtggcaccctgtctcaaaaagatacacaaatggcggggtgcggtggctcacgcctgtaatcccaccactttgggaggccaaggagggcggatcacctgaggtcgggagtttgagaccagcctgaccaacatggagaaacccccactctactaaaaatacaaaattagccgggcttggtggtgcatgcctgtaatcccagctactagggaggctgaggctggagaatctcttgaacccgggaggcggaggttgcggtgagccaagatcacgccactgcactccagcctgagcaacaagagcgaaacaccgtctcaaacaaacaaacaaaaaaagatagacaataataggtgttggtgaggctgtggagaaaattggagccctcatacaattgccagtggaaatgtaaaatagtgtagctgctttggaaaacagtttgacagttcctcaaaaagttaaactctgagttaccatatggctcaactacttcattcttaggaggattgaaaacacatgttcccacaaaaacttgttcatagaggtactcatggatatttataatagcagaagtgaaaacaacccaaatgttcatcaactgataaatggataaacaaaatatggtatgtccatacaaagggatattatttagccttgaaagaatttccgggcacggtggctcacgcctgtaatcccagcactttgggaggccaaggcaggtgaacacttgaggccaggagttcaagaccagcctggccaacatggtgaaacccatctctactaaaaatacaaaaaatcagtcaggcgtggtggcatgcgcctgtaatcccagctactcgggaggctgaggcaggagaatcgcttgaacagaggagacagaggttgcagtgagccgagatggcaccattgcactccatcccgagtgacagagtgagactgtctcaaaaaaacaaaaacaaataattcaacttcctcgcatggaccttgtactgaaacagggatttccaaacctttctttgtagccactgtgcaccagccccatcagagctctgtctctctcctgtgtccctctcttatgatgccaggcttctcgccatttgctcactcagctcaccgtcctgcctgtgctctgccttcatcctgctgttcattcatgcagcaaatattaactgagcagctgccctgagccacgtgctgttactaggcccctgatgatacggcagcaaccaaaacaacatcactatctcaaaatgtttacattctagtgaaggagacagatacatacaaataattaaacagacatacttgagagagatacatgctataaagaaaatacaagctgagttaaggagatgagtggtattattttaaacaaggctgtcagggacgtcatctctggaggtgatgcttgagcagagactggaataaagtgctcaagtactggttgaattagacgcgactggaacagaacgagaagctaaatcatgtatatccttagacaccaaagtctggttttctctctgtgtaacatgggatcagtagagtgagtagaggaaggacatgatctgagttagatttttttttttttttttgagacggagtctcgctctgtcgcccaggctggagtgcagtggcacaatctcggctcaccacaacctccgcctcctgggttcaagcaattctcctgcctcagcctcccaagtagctgagactataggcgcgcgccaccacgcctggctaatttttttatatttttagtagagacggggtttcaccatgttggccaggctggtctcgaactcctgaccggtgatgcgcccgcctcgggcccccaaagtactgggagtacaggcgtgagccactgcgcccagccctgagttagattttaagaagatctctctggctgctgtattgagaataaagtactgggggcaagagttgacacagaggcaacttttagaaggctactgcaataattcagcccgagtaatcgtggcttgtgggagaagtgtaggaatggagatgagaagtcagatttaggatatattgtgtatacataacggagaggtgtagtcagaacagatgtggaagcaagacagggcaaggctgactcacggcttttagtctgagcagctgagtaaaaatggtaccgtttacatcaaatagggaacggtggtgaaggagcaggttagaggggaaacagggagcatggctttggacccttaacgtttgagattcgacagaaaccctggttcacggaattgatccaagctacatactgataattgggattagtgagttacaatggcgttgcaagccatgaaactggttcagaccggctgaatgagcgggacaggaaggggctgaaacacttgagtccttgtgagagccccagctccaggggcagcctcgggggaagctccccgggcgatgactgcggtaatggagccgtaggagctccacgaggtgcaggttcagcgtcttagaaggatgagcagcggctcgccacagctcggaggcgggtgggcagcgctccaggccgagggccccgcgtcggcaaagacacaggacccacgacaaggcggccacggcctgagtcaaaaggaaggccgcgcgcctcctctccagcccgcagcaagcgggtgccacgaggcactcagccggtccccgaagttcctctcacgcggccccaagaccaccaccgtagtccaggccaacaagcgctgccgggactcccgaggccacgaatgagccgggagccaccagtagccggccaagtctcgcgagagcgcggcctcgccctcccagcatgccccgcgccgccgccgctgccgccgccgccgccgccgccgcgccgcggcttgagggcgggaggctgggggagggtagcggagccggcgccgccgccatgttgggtctgaagcggctgctgtaggcgccgacggagcgagcgggcgtgcggagcgggcgacagtggcgtgggatctgcctctctgcgagcagctgggagcggcggcggcggcgccatgagcgggggcaccccttacatcggcagcaagatcagcctcatctccaaggcggagatccgctacgagggcatcctctacaccatcgacaccgaaaactccaccgtagcccttgccaaaggtacgcgggaccgggcctcagggtgggggccgagccgggcgccgctcggggctgctccccgctccggcccgcggcctcctcgttccctcccctccctccgtcgagctccgggaggcctctcgcctcccttctccgggccccggcgtcgcgggccggaccgcggcctccccgcggctccctggtttccgccccccggaatgtccgcgcctgaagcccggggaactacgggactgagtgcgcggcgggcggccctgaagtccgagaacgggccggagaacacggagaaacgcgtcttccaactccgaaattcggggcttctgccgtcttagcacaaaacaaagccggagtattcaaagaatttttccgcccagcttgagttcatcgcggatgcgttgactacacagcacccattttctcactttgttcatttcaattcgtggcgatcttcctctggtgaactcttgagtaatgtgctaaaactttgggtttgctctgcgacgcagacattctcgaaatgccatcgatgccgtggagcagatcccatctccctcggctcatcctctgttggtatttacctgttaaaccggaatcctcaaagcctgttgtgcaaccacctcattagggcgcgtggtaaaaatgcttgctgctgccccgacgcccctgtttctggaaacgggttcaagcttgatccaggatccttcttgaccaggcaagcttgacctttgatccaggctcagtgggcgttgactgatccctctggaggctctctgggaaagggaattcggccgagaaggaaggtgcccctacccacagtgttaatatttggcatccctagagtctgtgtgggttttgtttccgttcacacgtgcagggcctttgctccgccaggaaaccagaaagaaaataaactttagctcctgaatcttaaaggaaatctcacaacagtgtaaaatactttgagggaagctagataacctaggtgattttcccagcacttctggtagaggtgggaactgcatagcatggttagggaccctgtggataggttaggtccaaggataaagaagaagattttcgaaatctgtaaaattttaaaaatcgttaacagataggggagtggtttcacgggatcaagtatttaataatatttcttggatgctctggtaaatcctttatttatttatttatttatttatttttctaagatggagtttagctctttttgctcaggctggagtgcaaaggcaatgatttcggctcactgcaacgtccgcctcccgggttcaagtgattctcctgcctcagcctcccaagtagctgggattataggcgcctgccaccacccctagctaatttggtatttttagtagagacggggtttcaccatgttggccaggctggtctcgaactcctgacctcaggtgatccacccgcctcggccacccaaagtgctgggattacaggcatgagccaccgcgcccagcctctggtaaatctttttaatagccctggtgttgggacaaatcttatacctgggtagggaaccttttgatgttacagaactgtacaccataaaggagtagtatgagatggtgatagttgcacaactctgcaaatttgctgaagatcattgaattatacactttttaaaatcaccaagtctaattttaaaagtagtatgaaaaaccagggagtacccccacatttccctcttcaccttgtgaaacattatgcagtgacacattacctcattaaaacacctgtagacttggcggttagaaatcggctataggatgtatgatggatggtatttggtgtttattaaagactttcccagtgatgcttcttaagtaacttagtttttgcttggccttattttgaatttatttttatattttttatacaatagttacttagctgtatagtgtttttctggctttttgaaattatgaaaaagcctctctttatgaaattatgaaaagtgctgggtgagagccagatatgggttgaaaataatttctcattaaagtggtttaataaatttgttttaaagtattgctttacctaatctgaatttaaaagtgtcttgccagcttagtgactcaataagttggctgtgttacctttattcctcacaaagaaaaaaaatacatttgaaaattttaaagtatttttgttcttttttaaaaactacgaacatatccttttatgcaggaaccccaaaagtctacattttaacaacccacattttaaaaaacttttcagcagcttttagagtcagtatttcattagtctgtaatagttaaattcatatgacataatgacataaaatataaatttgttctttgtgtcatgacttgataaatatatgaatatagcagtgaaaaatttttttaatcattgaatttatgtttgtactcatggctttgatatttcatcccacatcattatatgctttttctttttcttttttttttttctttttgagatggcgtctcactctgttgcccaggccggagtgcagtggcacaatcctggctccctgtaacctctgccttccaagttcaagcaattctcctgcctcagcctcctgagtagctgggattactggcgcgtgccaccacgcttggctaatttttgtattttttagttgagacaggctttcaccatattggccaggctggtcttgaactcctgacctcaagtgatccacctgcctcagcctcccagaatgccgggattacaggcatgagccaccgcacccggctgctttttcttaagcaacatgagttaaatgtgtaaccagtttggggaatttgattatgttcgcaaaaactgacattatcaaacctttatatattagtctacatgatattatctaatcgaaaactacattataactgtctagtcaatactggacacatttcagatttcaagattagaagcaaggagttcaatcttaaaattttaaaatttacatgacttgttgagtaattcgatatcagaaaatttcaccttccatttcaaaatttgaacgaagaatggtagtctaaaagattaaagccaaaagtgtttgttttgttttgttttcgtttttttttgttgttgttttgagacagagtcttgctcttgcccaggctggagtgcagtggtgcgatcttggctcgctgcagcctccacctcccgggttcaagcagttctgccacagccttccgagtagctgggactacaggcgcccaacacagctggctaatttttgtattttgagtagagacggggtttcaccatgttggccaggctggtctcaaactcctgacctcagatgatccacccaccttggcctcccaaagtgctgggattacaggtgtgaggcactgcacccggcctgaagccaaaagtttattcatggaatttataatacagtgtgtatttggatgtagagatccctgttactgtttttaaactatggattaagagttaatctctttgagtaacagtcttagcattctcttttgaacttttttttttttaatttctcagggagagtgttattgggaaacctaactacacaggctgaaaagatacataagataaaaatgaaatatttttaaacaaacatctttgtaaccaccacccagggcaagacagacattgccagcatcccagaagcctcccaccacctatattttcccatcacaactatcaccatcttaatttaagctagatataaatgttcttctgacatttatagttttaccatataagtttacatctctaaataatagagtttaattttgcccatttttaactttatgtaaataggattgtgttgtatatattttatttttagcttttattgtttcataatattccatcatgaatataacacaagtttattccttctgccattgttttggatattgcatttagattgtttgcagtttggggctattataaacaatgcttttatgaacatttctgtttaagtgcactggtgcatgtttatttcgttttcttgagattatatacttagaatttgaattgcaagaacatggggaatgttggtctttatcaggtaatgccaggtagtttttcaaagtagttgtttagtggtttttacttcatttattagtatgtaagagttcttgtttcatatcccttaccaacaaccgtacgtggtatcatatatttcaattctagccaatcctggtgggtatgtagttgtatttagttttaatcatttccctcattactaaatggggctgaccagcttttcatatctgggtgtttggatttcatttttcataaaatgcctttgaaatcttttccttttttaaatcgaaacacgtctttttctagagttctgtattctgaatatatctccattgttggatgtatatattgcaaacattttttccatttagtagtttctttaaattaacagaagttcttcattttaatgtaaacatgttcatcagttttttatggctagtgtttctttttttaaaacatcatagagatactttgattatctttaaacctttttgtgctttgctttttcacattgacgtttataatgcatctgaaattgattttgtgtacaatgtgagatattcagagctttatatttagtaagggattcacttggtttatattgtccatattataatttagggcttggatattataatttaaatatatctggaactataaactactcttgaaatttttggctatttacatttgatgtggtatataattagggtaaccatatggcctagtttgccctggtggaaagtccttgtttgtgcctgctctggcataattattaaaaacatcccggctgggcagggtgactcaggcctgtaatcccaacatttccaaaaggtcaaggccggggtattgcttgagcccaggagttcaaaaccagcctcggcaatacagggagactccatttctacaaaaaattttaaaaagtgcattagccaagcatggtggcatgcatgtctgtcgtcccagccacttgggaggctgaggcagggggattgcttgagcccaagaggagctgtgatcatgccactgcactccagcctgaaacatagaacaagaccttgtcttaaaaaataacaatgatagcctgtaatcccagcacttcaggaagctgaggcaggcgaatcacctgaagtcagaagctcgagaccagtctggccaacatggcgaaaccccgtctctactaaaaatacaaaaattatctgggcgtgctggtgcatgtctgtaatcccagctacttgagaggctgaggcaggagaattgcttgaacctgaaaggcggaggttagagtgagccaagatcacaccactgtactctagcctgggcaacagagcgagactctgtctcaaaaaaaaaaaaaacacaaaataataataataatctgttttctcttttgaaaatgtttcagtgtggataagttatcacaccacataatcaaaagcctaattgcagaggtgctgtgaaatggtcgatgtgccttattttctgctagagatgtcacagactagctttagttctagaaagtgaaacaggtaagtttgaggggctttgatcctcggaacctaagcatatgtcaagaagtcataaaggcaacctagaaaggctttgatgtcaatctgctatgtatgtttatagatgatctgtgttgcagtttgtttctgcagtttgttgcagtttgtagtctgtgtcacagctctgaatttattttcttctcagcactgatcatgacttacacttaatcttctttgcttatttgcatatgtgtttattgtctgtcttcaccttccccttcacctccagactctgagctcctggtatgaaaggttgtttagttagtgagtaaatggaaatgatttagcattttagcttattgttcttgtagaagtatcttgggtatacctccaaataatgcttttccatgttcacaattgcatttccctataaaattaaattatcctgcctcacattaagaaatcttgaagaatttcagtgagtagggatgcaagaggatgaaatctagtgacataattaacattattggggaggtaaactctttgtgactcaagctcaattataattttcatttaaagtttaaaggaagcctccattcagggtgtaggaagaaattacacagtggtgacatgtatgaatattttatggaatagttccagttgtgtttgcacctacgtctataagtgagtaggatgcctaaataggctaaaatgaatgaaattcttataaaaaataaattcttacatttagttagcttacctggataatcattcaaatggaaaccaggttgctactgcactgggaaaagagactttatgaagaacgattatataagccacttgcctttaaaataagttgttcttaaaatcaagagattggtggaagaatagaaaaacaagtaaattgttaacagatttctttaatcatctgctaagtctggctcattggcataatttatctacttcttgatgttagtcacatagtcataaactattaccttattggagagagtggaagagctttgtgtgatggataaaatacttgcggggtgctttatttgatttcttgcattacttggggatctaaatctagcaattcacaaaattactatctaaaatgacaaagatctagtgaaacttcaagccacagtttctttttgttgccctatttagtgatgttgccagtacttggagccttggaaacagtttattattgttacatagtccgcagaaatacttggtaattctgggagtctgaagtcaggtgccagaaactgttcattttctagtaggggtaagtaaggtaagccatgattttctaagtcggaagtaaagaaaacagcataaaactgaagaaaaaaaatagtagaaggaaggaagtaggaagaaaaaagaaatcttatctgtgcatgatacatagcaggagttttgtatttaactcagtgccacagtaataatagcagtaactacagatagtttaacttgaatttaattattccgtgctagaagatgcttgctatagaaacaatttgtctttctctcatgatgctataaaataatatattaattagctgttttaaaaactagataccattgaagtaaattttgttgttgttgttttgagacaagagtctcactctgttgcccaggctggagtgcagtggcacgatcacagccttgacctccctgggctcaggtaatcctcctgcctcagcctcccaagtagctgggaccacaggcacacaccaccacacccagctaattttctgttttttgtagatacagggttttgccatgctgcccaggtcggtctctaactcctgggctcaagtgatctgcctgccttggcctcccaaagtgctgggattacaggtgtgagccacagtgtctggcttgaagtaagttttttagtggacaaagtgtgagttggtctgtaaaataatttattcccaagggccttattctagttttgtagggttttttgtttgtttgtttttttctggaagaaaatgcgacccaaaatgccagttggaatacttagcagctttttggtcttggacaagttatttaaccttagctttaacttcttcatcttttcaatagggatggataataatgcccatctttcagagtcattctgataattaaatgaggtgatataaaagaagtaactagtttaatgttggtgcttaatagagaatagctgtcccatgttatttcccaccacgatctccctctctgtctaggtgctcagtctctctagtagcccaactcagtcagtcattcacacctactgtagtctactgtcatcttactgcctttcactgtcctctcattcccctcataactttacttccttctttatcctgcttcaactccatgagcaaccacgacagtcagtacacattccctcagcccccaccccattcccctcttgctgtcttatacaagaaatcacaaccctgattatatcaacacagatgtgctgaccagcctcactctaaatttatgttcgctagcctccgcagtcatggtcacttcctagcagtcacactatacttccataatccatttcacttttctacatggctattccattcattttcctcaagcctccaacacctcccccatattcactttcagccccttaaccgtgctttctatagcagttaactgagaaaagaacagcaaacgaaagataattttgataaacttacccctcacatacccagttacctgcatctgttccccagacttctatgtttttttctgatcaatatggataaactgttcttatttctgtctaagaccacccttccacttgtgcagcatttgtcccctcttggtgattcaagaacattgctccagcagttctctactctcctcagtttttccttccctaacgtatctttctgtctgcttacagataggcagttatttcttctaccttaagaacaaccaaaaaaccccactgtacttgaactgaatttcctcttttctaatgattaccccatttctatccttccctttatagcgaaaccccttgaagaagttgtctacaccactggtgttcattcatttttgagccctgtttactaaggtttttattcctacatatgaagttttcttatcaaaattaccaaagatttccatgttaccaaatccagtagttagttcttagtctcattctacttcaccagtcagcattacgtggtacagttagtctgttctctgtgaagcattttcttaacttgatcgtatgccatttttttcctcatatctcactggttacctctcaatctccttggctgattgaacctgtaagccgccaaatgttgggagagctccagggctcagttatctccccttttctctctgtctgttaacatttatttaatcatctgcattcttttgatgatctcatccatctagttcctggtttcaaatactacctgtatatcactgactcctatctctagcctgaatttctcctctgaactcctgacttgtatatccattgcctctttaacatctctacttgtagggaagtctgctagaatctcaattcagcatgctccaaacctgttcctccatcagccttccccatctaatcaaatgacagctctattctagttggtaagaccaaaacaccttggagccatccttaattcctctctctctgtctcacctcatgtgatccgaacctatcagctctgctttcaaactagatgcagaatttgacctctgaccacccctactaccctggtccattatctctcactagtctattcagagatactcagattcctgtttcttgtttccaatattgacctctcagttgattctttctcctcctcccaattttacttgagtgaatctttgtaattaaaaaataaaatatatgggaaatgtaggtgacaaattttcttagtgaacctatgttttcttgtgcttgactggttggttggctatgtatttccaaattaagagtcttttttctgtggaactttgaagttactgctttttgttcttctaatattctggggttgctgatgccagtctgactctcagtcacttttctctctggaagcttttatttagaattctctattcctggaattcacaaatgtgatcacactggtttgttgttgtttgtttgttttttggtttggtttgatttttcctctgagtgtttctctgtggaccttgtgaatctgaagagtcaactctcggccgggcgcggtggctcatgcctgtaatcctaacactttgggaggccaaggcgggcagatcacaaggtcaggagattgagaccatcctggctaacatggtgaaaccccgtctctactaaaaatacaaaaaaaaaaaaaaaagccaagtgtggtggcaggcacctgtagtcccagctcttagggaggctgaggcaggagaatggtgtgaacccgggaggcggagcttgcagtgagccaagattataccagtgcactccagcctaagcgacagtgagactccatctcaaaaaaaaaaaaaaagagtcaactctctttaaatctaagaaatccattcattctctctacctctgacacgccctccctcccctctccccctcctctttctagctccatctcagataatttctatcttgcctcctgctccccagccttgttattgttgtttttaattcctcatggatgcgtttatcctccaccctgctttttcactcttatatcatattttcatatctgtctcttggttttatcatttggagattaaaatataaaaacagccataaggaagaatgcccaactgaaagcagcttagagagtcaacattaaatttaaaccattgggtaaagatagcaaactggacatgcttttacttttccttcctgttgataaatcctatcaaaactacgtgagagggacttttaaaaaatacataaacccggccgggcgcagtggctcacgcctgtaatcccagcactttgggaggccgaggcgggcggattacgaggtcaggagttcgagatcagcctgaccaacatggtgaaaccccgtctctactaaaaatacaaaaattagccagtcgtggtgttgtgcacctgtaatcccagctacttgggaagctggggcaggagaatcgcttgaacccaggaggcagaggttacagtgagctgagatcgtgctattgcactccagtctgggtgacagagcgagttcgtctcaaaaaaaaaataaataaataaataaacccataaaggacaaaacagatttggaaaggagacaacatcaacacagtttggaaggctgaaaagcaaatagatgagtttaaatgacttagcaaagttgagagccgcaacctaagtagtcagtgggaaaagccaagatgtaacttgactttcaccccaaactcctaaaaggctcaggagttgacatcaacaggcacaatggaaactagaagattgaagtaattgggatgaagggtgtaagttttgggttataagtttaacttattaacttttaactttattgggtataagttacaatactataaaattcacccactgtaagtgtgcggtcccgtgaaagttgtgtatccatcaccacagtccagttttctaacaattccatcaactcaagaagcttctttgttgatgtttagtcagtagctgcctacgacccccagtcctaggcaacctctgatctactttcttttctagactttcctttgctttttttttttttttttgagacggagttttacagttgtcacccaggctggagtgcaatggcgcaatcttggctcactgcagcttctgcctcccgggttcaagtgattctcctacctcagcctcctgagtagctgggatgacaggcatgcaccaccatgccagctaatttttgtatttttaagagacggggtttcaccatgttggccaggctggtctcgaactcctgacctcaggtgatccacctgcctcggccttccaaagtgctggaattataggcatgagccactgcgcccagcctttcctttgcttttaatatgtaaattattaaattgatttcctaatattaaaacattcttgcatttttagaaaccttaaatttcaaacaactgtatttctctatatcaattatcaattggagtaattagccattatctataatagattcattacatggagttcatggtagatttcagggagtcttgatcccctgaagttataagcaatttttatttacatacagaaacatttggggagagggttcatagatgtctttaattttccaagacccagataaatacaagctacctttgcttatgcctaagttaaaagttttaacatatcttttcacttttctccctttgtcccattttccaggttttatctaatttggggtttaggttacagattgttattattacattgcttctatttttagaatcccttaagagcagttttattagcaatgttgacttagataaaactgagggggcttttttgttttttgtttttgtttttcgtcagagacaaggttcttgaggacacaacatttaagctggggcctgacagatgagttagaattagccacatgtagaggctatctaggaagatgttaaggctatctgttatgttcagttacataagagagatcctttgtaaatgtgttttgctttgtaataaaccttctaaggagccagtattgttttgttattacatcactctctaaaatttcaaattgcctttttggttttataaggacaagatgggctcttaacaagatggctttggggttttttcagtcgaagatgatgtaacctctagagttaagtgcgaagaagttgattttgagaatatattgcagaaggtgcaaggaacgtcatctgggttatgacctctggaagtggaggtagttttttgtcattgggtcgccagtgcttggcatgtgatctgtgaggtgatcgagaatattgcagacacaagggcaggagtaatgcctctgttaggggtgttaagttcgtagtgggttcaggaagagatggtggaggctgagggacagatgttttcattcagtgcagtaatatttgctaacaggaagaaagtagtgtgggtaagggtgaagaaggggccagagaagagagtgcagatgtgcaaaaagtgagagtttgtggaagcaggccgtgatgtggttccaagagctggactgtcgaatcttatttttgtaaagctctgctcttaagtaaaaaacccagagtcacctttctaccatgctaccttcagggcctgagcaagagtactgcgttgtagaagaggtggtgctttttagtatttaagtaattaaaccttccttgttgtattaaatccatatataataccttattccaacatatctcagatagtttctgtatctcagatagtttcagcaagagtttgtgtatggcaccgaatggacaagagctgtacatatatataaatgtcagaaagagaagaaaaatactaactgtaactttttggtttcctggtttgctgcttttgcatgtagactgttcttaaatatgctgaggttgggtttgtttttcccactttcccattctatcaacatcagttgttatttactctaaacaatcattctttcattttatcctaagtgagtttcttttataatttaattcagttcccttggtattaaacactgttcagtactttggaagtagcttacttaatagctttttctgctgtgtgatttattcaagaaatattcaaatgtcagctatatgtagagcactgtgttagattctgtgggagttgcaaagatgatctagatacagatctttctccagatctttaaattctagaagggtagtatagacagaatgatagaatgctgtgtggttttcaaaggaagaacagattatttcagcccaggtggagttgggtgatggctaattttatgtgccaacttgactgggccacagtgcctagatatttgatcaaatattttcgatgtttctgtttaagtattttttgtatgagattaacatttaagttggtagattgtgagtagcctccatctgtgggtgggcctcatccagtcagtggaaggcctttaatagaacaaagactgacccctgagcaaggagttctgccagcctgctctgcagattttggatttaccaggcctccttaatcccttgggccaattccttaagtctctttctgtgtttgtatatgcacatctgatttattctgtttctctataaaacctgaccgatacctggaatcttcaagttgaaatttaggatagggggagagagaaaaatagaggacagaaaacctgatctgtgaactgagaataatgagctttgttagaatttaagtttgagtatgctgggaccaggtcttggagctgatacaggactgaagagttttaactttacatcataaatcttattctaagttttcatttgaacctggttttagtttcttaactttgtaagcgtcttttggatatttcagtgtttcatttgttgctctcaaattttggtattcaacagactcgtttctttttcttttcagttaacattagagtctaatttacaatttttagttcatgtcaaaaaaaagttcaggccgggtgtggtggctcacacctgtcatcccaactctttgggagtccaaggcgggcagatcataaggtcaggagatcgagaccatcctggccaacatggtgaaacccagtctctaatttaaaaaaaaaaaaatacaaacattagcctgggcgtagtggtgcacacctgtagttccagttactcaggaggctgaggcaggagaattacttgaacccaggaagcagaggttgcggtgagacgagatcgcgccactgcactccagcctaagcaacagaccaagactcggtctcaaaaaaaaaaaaaaagttcaggctttgggaaatttttttttttttcttttgagacagtcttactctgttgctgaggctgtagtgtagtggtgtgatcataactcactgcaacctccgcttctggggttcaggcaattctcatgcctcagcctcccaagtagctgggattacaggcgtgtgccaccacaaccggctaatttttgtttttgttttttcttaaattagagacagaggtttcaccatgttggctaggctgggctcaaactcccaacctcaggtgatctgcccaccttgccctcccaaagcgctgagactacaagtgtgagccaccatgcccagcctggaaaatgttaatagtgtcatttggagggtactagcttcacttaactatgtattttaagtatataatgtttatcatgcttaaatttagaacatttttggtattttataatggaggtattgtattgggaagtttgtcactacaacttatttctctggccttgtactatgattttatatacaagtattatatacactaacaaccagtttggcattaggatgatgtttgagcttaactaaatctggagactggattagatgagtgattttgccaaataatttgaccctgttttgttgttgttgttgttgtttgtttttttaatgcatgtgatgcatttctattaataaatctttggtgttatttcaagctagaaatataaaattgattctattttaagactaataaaattattagctgggcatcatggctcacacctgtatgtaattccagcactttgggaggctgtggtggatggatcgcttgagcccaggagttggagaccaacctgggcaacatggcgaaatcctatctctacaaaaaatacaaaaattagccaggtgtagtgtgtgtgcctgtagttctagctactcaagagactgaggtgggaggatagcttgagcttgggaggtaaaagttgcagtgagccgagatggcaccactgccctccaacctggactggatgacagagaagggacgctgtctcaaaaaaagaaagaaaaaattattagggcaatgtagcagcatgatgaagtttaaaatgtagaggacaaccacccctagtttccccattctccccaactacttttgtcattctctgtattctcttgtaggctgtatttgtaggtgtgtgcgcacatgtgtgtttgaagttgaaaattcacattacatgcaattaaccattatattgtgtacaattcagtggcacttagtgtagtcacagtgttgtgcaactaccacctctccttagtttcaaaactttccatcatcctactaaaatacccctaggcattaagtaatccctcttcatttcccccataccctgttgaccactaacctgctttctgtctccatggtttttcctatttcggatatattatgtaaaaggaatcatacactgtgtgacgttttgtgtctagcttcttttactcagcataatgctttcacgcttcactcttgatgtaacatgtatcagcattgtggtttttttatggctgaataatatttcattacatgtatttttaaatatatatatcatatatataagatatatagagatcataatttgtcttttgttgatgggcatttgggttgtttctaccatttggctgttttgaataatgctgatataaacatttgtatacaagtttctgtgtgaacataatataatctctggtactttgttttggcagccctagcaaactatattgtgtgctttatttccagtgtagtgcttagcccacttgctggactgtaacttccctgagggtggggacataaatataatgcctgcctaatattacttaaatattctaagcctgctgaatcactacattttcgttaattcatgataatccccaaaatatcccagaatcagatcagtatctattcagctacataatactacttaatagtagtagtatggcttactttgaagcctaatgctgtgtcagcttcagagattaagatgtcaggaaaccaatagtagtacttattagaggcattgcaagtggtatttagtgtttagtggaccttcaaatccaattcagtgatatcaaatccaagtaagcaaatagactgagctccttgagaataggaactggtttccctagcatctagcatagtacctgggacaggtggtgcccagcaagtatttgaaagaaatgggatgaaatgcaatgacatacggcacctatgttcagcttaaaactccagtcacattacctatgggtatttacattggaatgtgtagttgctgtagaatcccaaaatgaatactagaataacaatgttctttctcaaagtactacgtgttatgaatgaaaaaaaaaatgattagaacatagttcagattttgccagccagacaaaggcatttgtgctgtaatctgaggtatgccttcctgcactaagaggaacagggtttatgggaaaactaggattaggagcagaccatttgaaatctgtgcatctttgtaatttaagcactaatgtaaacctaataaaaagatagtagtgtgcttaaagataagttaaaatttttaaacaaataatttggtaaatttagaactttccctttaaaaacagtaaaggtgaccagaagtggtggcactactcagggctagctgtatttaactgttgttacctgcaaatgcaaaaactaaataacattttaggaaaaattggaaatgaaccaatgtgatttctgaatgtactgacataattcccttatttactgattgcatatgagctaatgtatgtgttgtagtagaatagttccagtagttctttaccttttctgtgcttatcatgcctccttcctttctactgttaatgttcaagttttaatcttccagacttctcatttgttctgtaacagtatcttctagccacgtgtgcccttctaatctctcttgtggaatttgttcttcacaatactacaagaattctattgcattgaaaaccccaaatcttattaagccagcctccatcattagagcatgtttctcaaactcttggtgtgtgcaaatcattcttattctgtgatttctattttcatgctttttcagtttgcttcatttgccatatgatagaggttttcttcagaccatattttggaaagtatgctcttagttttaaattctactatgggttatttccaagacccatagtagaatttaacaaattctttcaaataaaaaattttaaagccttcgcttattatcaactagccaaaaaaaaaaaaagtgtatcaagtgactcctacttgacatgatgagagatgaaagtgtaagtttagatactactactgtctgttgagtttcctctctctccattcattttaatctcccaatttttgttaaaatgttgtgatatactgttcttagtttgttacactttgtaactttgtagtcttttccagaactatttctattctagaaccaaagtaaattgtcatgtagacttctgtgttgaaatgaatttattgtccatttcttatctttagataacactttttttgagttattttgatataccaaagcataagtctctgtggcttgtagtggtctgttttttgtttgtttgttttgtttttttctggaaatacagtgaaagcttttgatgaaatttaggccttcatgttaagacatttctattctgttatatctttaattatatttttcttattcttttgtctatctcaggggcagcagttaactgttggatcttcataactatcatcttctctctaacctttttaatgctgtagtactttttcatgacatcttgtttaccttttctcaaaattattctcttctagtgatttggttttgctgcattgactgttgttgcatttattagttatgctgttttatttatcttgtgtaattttctttccttaattctgcatgctaccctttcaatgttgttttgatcataaaagtctatgctatctgtttttcttgtgaatgtcgaagcagttgtttcagaaaatttcttctattttctgtgataaatactaatactgaatgtatttcatctaccttttgaagactgtgtcctatcagggcaaactgctggtaatggaaaaaaaaacaaaataagtaaatgaagaccgtgtcctctttgattcttctcttcttctttactgccttttttctttattttgatacacctttttctttccttccatcattgcctccctcctttccctcttttcttcccttctttccatctttcctgtaaaatttttcttgattccctgatttttctactctttttttctttagtaggtcctttcagtacctgctgcttgccaaaacgtgaaatgcagattctctttttacttgactctgaattcacctggctaagctctgttaggccttaggaagcttaatagagcttctctaattttgtagaagaagggcctttgactttttccctctctgcttcaggatgatctcatctgctactttggaagcatgagactttatttgttttgatggtactgaggttaggggtgagattgatttatttgtaattagtcctttctcctccttatccttccttttggataaaggtaaaaatataaaatcctcctgcctgctaaagtactgtttggccatcagagaaagggagcttcaggtagggcattccgcagtccctgtccccatcttagcaagttgaagatgctagtcaaaatttctctggggggcaggagagggcagaggatacttacgtatggattctggggttggtctttcagtttcaactaactcattctgtacctgaatgatactatttaataaaatttcgtggtatgagtttgagaacttgtcatgattttagggatattttaacttcctttttgtttctttcctttagttttagggaaggatcttctgccaaactacctgtgccactgtctttcctggaagtctcataagtactagaaagaacttttagaataagagtgtaggacattatttacactgaaataacattctttttgttgtttttttttttttttttttttttggagtcagattgtcattctgtcacccaggctggagtgcaggagcgccatcttggctcactgcaacttctgcctcttgagttcagccaatcctcccgcctcagccacctgagcagctaggactacaggtgcatgccaacatgcccagctaatgattttttgtatttttagtagagatggggtttcaccattttgttgaggccggtgtcaaactcctgacctcaagtgatctgcccaccttggcctcccaaagtgctgggattgcaggcatgaggcgctgcatcagttctgcaaaaaaaaaaaaaaaaaaaaaaaaaaaaaaaaaaagcgtatgcattaaaaatactaagggggccaggcgcggtagctcacgcctgtgatgccagcactttgggaagccgaagcggatggatcacttgaggtcaggagttctagaccagtctggccaacatagtgaaaccccatctccgctaaaaaaaaatacaaaaattagctgcgcatggtggcacacgcctgtaatcccagctgctcaggaggctgaggcaggagagtcgcttgaacccaagaggcagaggttacagtgagccaagattgcgtcactgcactccagctggggcaacagaatgaaactccatctcaaaaaaaaagaaaaaaaatagaaatgttaaggggtttacttcctttagggtactctttaaatgaaatatgatgtttcatattctctatttggaacttctgtatggatgcagacattttcagaaatctcccaggacaatgaacctgaaacttatgtatttataagaaacttggggatttggttattttatttacttattttgaaatagggtcttgctgtgtcacccaggctgcagtgcagccacgcttcagtacagcctcaatctcccaggctcaagcgatcctcatacctcagcctccttatagctgggactacaggcatgcactaccacacctggctaatttttaaaaatgtttatttttttgtagagacagaacatcactgtgttgctagggctggtctcaaactcctgggctcaagcagtcctcccaccttggcctcccatagtgctgggattacaggcatgagccactgtgcctagccagaaattggcttaaaatgcagatttttggaccctgtccccagcaaaaagattcggtagaaatctttattcgtagccagtttactgtgttgcaggtggtccccagtttaactttgagtaatgctgtcttcattgttaaaataatcagatttaattatatggtagatattttaggtaactagggtatttcaagctgtcccatggggctgagtagctggcagctgcttgacttggcttctagaggacttactgctcagcaaggtaaatgttattaataccttcattgctctctgtgtcccaaaggtcaatacccaaactttgagattttgtagactggaggaatctttgtctcccactccttccccaagaaagacatgggttgctaatttttattttgtcgaatgaggacattaaaaataagttaaccgtgagccaggcacagtggcttaggcctttcatcccagcacattgagaggctaaagcaggaagatcacttgaggccaggagttcaagaccagcctgtgcaaaatagcaagacctcatctctactaaaaaataaaaaaagttagctgggcttagtggcacatgcctgtggtcccagctacgtgggaggttgagatagaaggatcgcctgagcccgggaagctgaggctgcaggaagccatgaccacaccactgcactccagcctaggggacagagacccagtctcatcaataaataaataatgaaaggacattttaacaccccactacaaccactaaagatacaaataaataaaaatataagaggaacacaacctcataatacagatagtcttttatattgcatatatttaacttcgggcaaaagccactctattttcctctttaaaaaaacttttttagctatagattaatgaatactttctcagacatttcagaactactgcttagtacttgaaatacaacatttagaatctggggtactacctgaatgtgatgagtagtcacacatctcatatcctttgttttcttgccagttcgatcctttggtacagaagacagaccgacagatcgtccaataccacctcgagatgaagtctttgaatacattatattccgtgggagtgacattaaagaccttactgtttgtgagccaccaaaaccacagtgttctttgcctcaagacccagctattgttcaggtaactgatggtaaatttgtcttggagtacaggtaaactccgcacagggttagccttggcttttttctctctagttgaatgttcatgtagcttatcatttccaagttactgggatacctgaaattactggataatgttctcatctaggtttttctctttgtatcataaattagaactaaggtaagaaacagctgaggaatttattatgaaatattttctaatttcaacaacaattaccatagctaacattgaaggctactctgtagaagtgctgtgcatataagataccctctgaggttggtactataattattctcacttttaacaagtgaggaagttcagatggagccacaatttgaacagatccaggcagcctgcttcagaatctaggatccgtgctaccatgctattgagatatggtttatattgcaaaccaaggcaataacagctactcttaggtaagattattaggcttaatggggaaaaaaaagcaaaatcacattgttctgcatatgttataatatgcagtgttggtttttgttttgtttttctttttctttttttttttttttgacagagtcgttggagtacagtggcgtgaactcggctcactacaacctccgcctcccaggttcaagtgattcttctgcctcagcctcctgagtagctgggattacaggcatgcaccaccacacccggctaattcttgtatttttagtagagatgaggtttcaccatgttggccagcctggtctcaaactactgacctcaggtgatccgcccacctcagcctcccaaagtgctgggattacaggcatgagccactgtgcctggcctgcaatgttatataataagaaaacacaaacatcaatgtattttaacatatttagatcagctcttaaatctcccaatttaagctttttaataaggaattgtaaattttgttgcagcataagctggagaaattctctactctcatctacccctacccttgttaagtcttattttggtgaaaggaagcctgaagtggaaatgtgaatctctttaaatggagaaggaagagacacattcttaatagagatagctccctacaccaaacactggagttaccttactgtctcttttatatggcttttgataattctccaggaaaccagttatttgagtaatcggttttatggaaggagaaaaactaagagagcgcatatgaaaatggtgttgaataacttcttccaatcatcataaacttctacttgatctccttattcattcattcagtagtatttacagagtatctggcatgtgcttaacactagtggtgaacacacagaaaaggtcctgccatcagtgagtgtatgtcctggtagcctttaatacacttcatgtttatattatgaaacagtttatagtaagataatatatgaagtatacatgtattaatatatgttatatattttatatgctttaggtttaagttaaagtttttataaaatgttcctcagcttaatgtaactataagtaaaaatgtaaatggttttatgtgggatatgtttgtttctacgtctgtgaatttaatagtaggcctcaaatgattgaaaataagagtaaaatcatacgtgagatttatatcaacatcagactaaaactcattattactaagtgtgatttttctcatatttttctttaagcaaagttactttacttaagtaactttaattctttcctcaatctataaaactcttaattcaaatggggagtttattgtagaaaaaagtatttgtaagtcacattgagtataattggcacattatagacagatactgaaatcaaaaggttgtttggctattttaatattaagtgcatattgtaattcattttatatctagtagttataatttaatagttttcttaaaagtaaaaatctggaattttttttttcgttatatacatgttgcttagagcttggaaacataactcatgattttccttcagtcctcactaggctcatcgacttcttcattccagtccatgggttcttatggacctttcggcaggatgcccacatacagtcagttcagtccgagttccttagttgggcagcagtttggtgctgttggtgttggtatgttttctttttcttttctttttttgtttttgtattcttcctttctttaccacaaaggtatagaaactcaacaccaactattagaaatgttgtttgatgttccttttgtaactttgttttatggtattcagaacacattttgatgatatcttaaagcctttattgatattagtgggtttttaaaagtcagctttcacagagtaacatttttttttactaggtaaaaaaaaaatggatatactaggtatatccaatatctaccaaatctaccaaattggatatactaggtatatccaatatctaccaaatcttattggtaattggttttgttttgttttttttaaagacaaagtctcactctgtcactcaggctggagtccagtggcactatcttggctcactacaacttccacctcgtgggtttaagcaattctcgtgcctcagcctcccagatagctgagattacgatatgcatcaccacacccagctaatttttgtattttcagtagaggtggagtttcactgtgttggccaggcaggtcttgaactcctgacctcaggtgatccacctgcttcggcctcccaaagtgctaggattacaggtgtgagccactgcgcctggcctggattttaattaataaatttttctttttaatttctttttctttttttttttttttttttttttctgaggcagagtcttgctctgttgcccaggctagagtgcagtggcatgatctccgctcactgcaacctccacctcccaggcttaagcagtgctcctgcctcagcctcctgagtagctgggattacaggtgtgcgccaccactcccagccaatttttttgtatttttagtagagatggggtttcaccatgttggccaagctggtctcgaactcctgacctcaagtgatccacccacctcagcctcccgaagtgctgggattacaggcgtgagccaccaagcccggcctaaaacatttaaaaatgtttattttaaacatacataagacatgcacacataaagatacgcatagcatgattgagggcttggtgttttgtttctgtaacactggatttgaaacgaaactataatgagaatgtatagcagggctgggcgaatgacaggcttgcttatgactggagggtcaagggctattgagtgcaaaagctggatgtaatcagattagctcagtgttttgtttttatagctatgcattttagcgtttaaaccatggtaaagaacagcttttaaaaaaaaatcgcttctcagccttttggctaagctcaagtgtaaaaaaaaaaaaacagctttaaatctcaagcttttgcccctaatcttttaaaatttcattgaaataattatcagtttactgtttcactgcaccacaaatttagtttcaggtgtatcttgaaactcattgatatgctaataagttttattaaaattgttaaattccttcctgtgaatatactttttatacagatgtgacttaagtatttaaatgttttacttattcacaaaataacaaagaatggcaaaaaaaaagcaaactaaaactgaatgagctgggcgcggtggctcacgcctgtaatcccagcactttgggaggctgtgggcggatcacctgaagtcaggagttcaagaccagcctgaccaacatggagaaaccccatctctactaaaaatacaaaattagctggacgtggtggtggtgcatgcctgtaatcccggctactagggaggctgaggtaggagaatcgcttgaacctgtgaggcagaggttgcagtgagctgagatcgtgccattgcactccagtctaggccacaacagcaaaactccgtctaaaaataaataaataaataaaactgaatgaatataaacagaaaccacagatgctattacatattaaattgataatataaccacacagagggctgggtgcggtggcttacgcctgtaatcccagcactttgggaggccaaggcgtgtggatcacgaggtcaggagatcgagaccatcctggctaacacggtgaaactccgtctctactaaaaatacaaaaaaattagccgggcgtggtggtgggcgcctgtagttccagctactcgggaggctgaggcaggagcatggcgtgaacccaggaggcggagcttgcggtgagccaagatcgtaccactgcactccagcctgggcgacagagtgagactccgtctcaataaaacaacaaaaaaaaccacacagaggaaaaaataattcaggtaacttttacactcttagtaggatatattctaacaacaaatagaactactaagaaaacttgactttgatttgtattattggtgttattatttatttatttatttatttattttgagataagatctggctctcacccaggctggagtgcagtggcacgatcccggctcattgcaacctccgcctcccaggctcaagccatcctcccacctcaacctcccgagtagctgggattataggcatgcaccaccactcccggctagatttttcttttgtattttttgtggagacagggtttccccatattttccaggctggtctcaaacttgtgaccttgagtgatccgcccatcttggcctccaaaagtgttgggattacaggtgtgagccactgcacccagccaggtgttaattcttaaactgttttgtatgtattataggaaagggcaaatgaataaaatacttatgttgggaaatagtgtttttaccatggagacggaagatataaatatggaatgggaaaggtgagaaagaaccctgtggtgctgaatgtaaatagatggtatgtgtatggactcattttttaaaaactggttatttcctagctctgttcgtagaaaggacctagaaacaatggaaaccccgtagcaagggacacatgtagactcagctcttagtttctaaataccactccccactaaaaggaacaagggcccattgaaaaacaaaggaaaagacatacttttttcatataaaaatgcctgctaataagtagaagcagtggtagataaagaaaattgccattttctaatctcagtataataattagcgaggattatcattagatgctgaagtcattgggtgaaaggtgttaggacagcatattaaggtggtcttaaagtatcatcccacaatttacaaagggggaaaaatgtacccttgtaacacagacatctggtggttaccaacttcgttgagtgctcaagtttagcattgccatgaacaattatgtgtctcctgttgtgatgattggggtggggggcaaaacataatatcacctttgtggggttcttgctgaaaatacagaatctaattttgaagaaatgggcttatatatccagaaggtgggttgttttgcgagacagttatccacactcttcaaaagattcaatattacaaagaatggagagaggcagcagaactgctttaggctggcaaagactgaagagacataacatccaaatgtaatatagaatcgaatactgggcttttaaaaagttggcgtgtttgtttcctgcaggggagaaaaagaaaacttaaaaagttggtgtgaagaacattttagggactactaaggaacttttgagtatggactaattgttggattttgttattattgttaattttctggttaatcatatgggaaagtgtttttgtttgggggaggtggttttgaagtatttaaaagtaaaagggccaaattgattttagcctctctaaacaaaagaaaaatgtgtatattaaggtataaagatggagaaacagagtgggtttggttagatgttaacagttgatgagtctaggtgaggaatatattgatattctgtgtactccttcaattttaacataggtttgacatttttcataattaaaaattaattccttttagacttactttaggtgaaatagtgtaactttggtccataaatttccaaatccagtagtaagatcaatgttatttattcatgttaaatcaagatatactgtatgttaactgtaacttagaatcctttcctggggattcaagtaaggaatgattgcaaattgtattatcctttttgaggctcctttgactaaattaaatagttaactgactttgagatcatcattatacttcttatgttaccatgaagtttatgtaactaattatgttaaaaaatttgaacaggatcaagcacgtagtatctatatagtaactattgcttctgccattcttcaaggtttactttttaatcagagtattttgtggttgtgaaatgcttttataaatattttaatctaattttaatattattgtgggttgttggtttattacttgggtgtcacaaaagtagaagattttactggcattttccatgtcagtagagtaatttttgcagggtcagattatttttgattaattgatttccatattggttaggataatttgtggagtggctaattagaaaactagtgttagaagttaccaaatgaggaagaggaaagctgtggcattggtcaaggtgacagatgtttttcagaaaaggaattaacttaaatttagcttgttttttgagatggcgtcttgctctgtcacccaggctagagtgcagtggtgcgatctcagctcactgcagccccctcctcccgggttcaagcgagtctcctgcctcagcctcctgagtagctgcggttacaagcatgtgccaccacgcccagctaatttttgtatttttagtagagacagggtttcaccatgttggtcaggctggtctcaaactcctgacctcttgatccgcccgcctcagcctcccaaagtgctgggattacaggcgtgagccaccatgcccagccaaatttagcttttgttggcacaaagtaaaccacattttaagctaggcctcttttcatttttggttcctagtattctgattttaaaaggaaatttaaatgaatctggatcacagtattgctatttgatgagaaaatttttatatatttacgttttcgtgtgttattactattgctttttatttttatttatttattttttgagacagggtctctttctgtcatccaggctggagtacagtggcacaaccacaggtcgctgcagcctagacctcctgggctcaagcagtcctcccatctcaacctccctagtagctgggactacaggcatgtgccatcatgcccagctaatttttgtatttttggtaaacacagcatctcagcatgttatccaggctgatctcgaactcctgggttcagtctgcctgcctccgcctcccaaagtgttgggaaccaccatgcccacccttattattgctttttagtaagtttttttttttttttttttccatttggttggttggtttggtttttgttttgttttgttttgttttgtttttgagactgagtcctgctctgctgcccagcctggagtacaaagacgttagcactttgggaggccatggcaggaggattgcttgagctcaggagttggagaccagcctgggcaacatagctaaaccctggctctacaaaaaaaaaaaaattaggcaagcatggtggcacactcctgtaatcccagctgctccagaggctgaggtggggggattgcttgagcctgagaggtagaggttgcaatgaaccaagagcacgccactgcactccagcttgggaaacagagccagactgtgtctcaaaaaaaaaaaaaaaaatcttgcttatagtgaaaaacatacaaattaaatctacactgagacaccatttctcactatcagtttggcaaaaactcaaaagcttgattatatgcatactcttggcaagtatgtgaagaatatatactctcatacattgagaagaataatataccaggtagaattaaaggactcactctgttgctgcccaggctggagtgcagtggcgcatctccgctcactgcaagctccacctccctggttcacgccattctcctgcctcagcctccctagtagctgggactacagacgcccgccaccacgcccgggtaattttttgtattttttttagtagagacggggtttcaccgtgttagccaggatggtctcgatctcctgacctcgtgatccgcccgcctcggcctcccaaagtgctaggattacaggcgtgagccaccgcgcctggcggacttttcttaaaactgatgcaaaaataattcttatgtgtaagagattagatcattactggccttaatttctgaactcttggaaaaattaaacacctcacaataaatgaagcatcaaaacagtatttccctgtgttaccattgaacagtagcaagagcttactgctgcagttagaaaaaggattcatagaaacagtgaaaggtatagattgaccagctatctaaagtaattctatagcaaggattacagtgaagaaacatggagcaattagatgttttttctgttatatttactccagttgattgtttaagtctcataatcttatgtgccagatggaggagtattggctgaatagaccatcagtgggtacattttagttgattaaatagccaaaccatattggaggatggttctcttaggtctccagtgttttgtagagactaatttttaatcactgagtgatgaagccttgaagagatgcttacgaactttacagttagcataaagccaggggggtgtttcaaccattatggatgttaaactaaggattattaaagatcagaccaggcacagtggctcacgcctgtaatcccagcactttgggaggctgagacgagtgaatcatttgaggtcaggagttcaggatcagcctggccaacacagtgaaaccctgtctctactaaaaatacaaaaaaaatgagccgggcttggtggcgtgcgcctgtaatcccagctactcaggaggctgaggcaggagaatccctggaacccaggagatgaaggttgcagtgagttgaaatcatgccactgtactccagcctgagcaacagagcgagaccctgtctcaaaaaaaaaaaaaagaaagaaagattgttaaagatctactttggtaaaatgtgaaggaattaaacattccagttaaaaggcagagagtgtcagactgaatttaaaaaaaaaaaaaaaaagacaaggcccaactatattatgtttataagaaatgcactgaaagtgaaagaatagaaaaaggtataccatacaaacagcaataacaagaaaagtgtgtagcatacgttaatatcagacaaaggagcttaaagatcaggatttcttccagaggtaaaggttgggggggcgttcttcgtaaagataaggatcagttcatcaagaagatacaacagtcctaaatgtgtaacttttataaaacagtatacccaacaattgcagaatattgttttaagtagacatgaactgctcaacaatatagaccaaatgctggaccataaaataagtcacactaaattccaaaaggaataaaatcatacatggtatattgttaaaccacaaaataaacttgaaattaataaagttaacttgaaaaatccccagataatttggtatcaagtaaacttgttaatcactaatggatcagaggagaatttacaagggaaattagagaatattttaaatctagaccagatgtgatagcatacacctgtaatcccagcactttgggtggtggccaaggtgggaggatcacttgaggccaggagttcaagaccagcctggggaacatagggagaccttgtctctgcaaaaaaaaaaaaaaaatttaagtagctgggtgtggttgtacatacctgtagtcctagcactcaggaggctggggtgggagacttgattgagcccaggaattcaagactgcagtgagctgtgattctgctgctgcactccaggaaaggcgacagagctagaccttttctctaaaaagaaaaaattaaattaaaaaaattttattttcaatttaatgaccagaaagtttgtgggtgtagctaaaacagtgtttagaaaaattttcatagctttaaatacatgtattagaaaacaagaattttcggctgggcgcaatggctcatgcctatgatcccagcactttgggaggctgagatgggcagatcgcttgaggtcaggagttcaagaccagcctggtcaatgtgataaaaactcgtctctattaaaaatacaaaaattactcaggcgtcttggcatgcgcctgtagtcccagctatttgggaggcggaggcaggagaatcacttgagctggggaggcagaggttgcagtgagccaagatgacgtcactacactccagcctgggttacagggcaagactttgtctcaaataaaaaggaaaagaaaataagaatttttaaaatcagtgctttaagctaccagtttaagaagctaggaaagggccaggtgtggtgtctcccacctgtaatcccagcactttgggaggtcaaggcgggcagattacctgaggtcaggagttcgagaccagcctggccaacatggtgaaaccccatctctacaaaaatacaaaaattagccaggtatgatggcaggtgcctgtaatcccagctactcaggaggctgaggcaggagaaacgcttgaacccgggaggcggaggttgcagtgagccgagatcacaccattgaactccagcgtgggcgacagaacaagactccatctcacaaaaaaaaaaaaaaaaaaaaaaaaaaaaaatactaggaaaaatggttagctgggcatggtggtgaatgcccttagtcctaactgcttgggaggctgaagtgggaggattccttgagcccagcagttcaaggttgcagtgaactatgattgtgccactgccttctagcctgggtgacagagtgagaccatgtctctaagaaaagttggtgaggacgccaggggacagctaggaaaaaaaatgaaagaaaattattccaaaagtagtagagggggaagaaaataaaaagataagagcagaaatcaatgaagtagaaatagattatattatcagcaaagtcaagagtttgttttgggtgggtttttttattttttatttttattttataagattgataagtccctaacaaaactgattaaggaaagaaagaacaaccaagcaagttgccaataccaggaatgaaagagtagacgtcagtatagaccttaaaagaataatatgggaatatatgaatgtcaacaaatgtgatagtttggatgaagtgggcaaatttcttgaaaaatagcaaaccaacacaagaggaaataaaatctcaatatctctatatcttctaatgaaattgaaacagtaatttaaaatcacccagaaagaaaattctagactgtttttactgttacattctaccaaacatttagggaagaaataattttcactaatcttacacaaactctttcagatagctatgcaccatgatgcatgcctgtagtcccagtaactcaggaggctgatgcagaaggatctcttgagcccaggagttcaaggctgcagtgagccatgattgtgccactgcactccagccaaggcaacagagcaaaaccctgtctcttaaaaagtaaaaaaagactgggtacggtggctcaaacctgtaatcccagcactttgggaggccgaggcgggcagatcacgaggtcaggagatcgagaccagcccagccaacatggtgaaaccctgtctctactaaaaatacaaaaaaaaaaaaattagttgggcatggtggcgcgcgcctgtagtcccagctgctcgggaggctgaggcaggagaatcgcttgagcccaggaggcggaggttacagttagctgagatcgcgccactgcactccagcctgacgacagagcaagactccatctcaaaaagaaaaaaagaaaattcagagaatacaggaagaggaaatatttgctgaccctataaccaaggccaaataactgaaataccaactgtgactggatcgttacaagaaaattatagatcattgtcccccatgaacataaacgtagtaatgtttattagatgtagaagccagcacttcagaagaaggattgtatatgatgacaaagatttatctcaggactgcgaagctgcaacatttgaaaatcagttgtaacttaccacgttaacagaccaggaataaagaatagagaatccagaaatagacccactcagatacttaaaacagagtaccaagacagttcaatggagagaaaagacattgttttaacaagaggtgttgcagcagctgtttatctgtggaaaaaataaaacttgacccctggcttaaactataaattaaaaataatttggaatagattatagacataaattggtagtagaattggagtagagcgaggggggtgtggcacgatcaggaactcacggaagagatttgctctaaccattgaatgcgtaatccagaggacaagcaatgggaggccaagccaggtgaggaaacacagagcagcctggagatgcaaatatacatcaaagtggctgatgtcttggtcatcacccaggaatactagaaataactggatgggttctactccccacagaattcttgaaagcgctagtccccacattaccgggatattgtgggaagttgtattaggcttctcctgagcttactggagctgcagccagactggactgcacctccaagggagtcccagtggctccccttgtctaagatactgtgctgctttctgaagccacatttttttttttttttttgagacagagtctcactctgtcacccaggctggagcacagtggcccaatattggctcattgcaacctccacctcccaggttcaagcaattttcctacctcagcctcctgagtagctgggactgcaggcatgcgccaccacgcccagctaatttttgaatttttgtagagacgaggtttcatcatactggtcaggccagtcttgaactcctgatctcgtgatctgcccacctcggcctcccaaaatgctgggattacaggtgtgagccactgcgcccggccctaaagccacattttaagagggataagaacaaatagaattcattaaattaggagtccaagaaaggaaggggagagtgtcctaaagaccatgtgaagtgagtaatggttgaagggactggagttgactaacctgaaaatgagcaaattgcaaggggcatgattgtaatcttcatgtgttttaggagcagaaggataaacttctgctgtgggctagactggtgaaaatatagaaaatgttgagagaagaggtaggttttattaactgaagtgaatagtttgaacttttatcttgaggacagtggaagccaccagaaggtctaaagcacgataatgttattacatttatattttgtaaagaatcactctgactaccatctttaggttggatttagaggttgtggaagggggaggtactgttgaaatatagtgaaaacctgcttagatgaaataccaaggaaagagcacagtatatcaaaagtgaatgatccctaagtactgtagaaacttagagaagaaatttgatataacctagtatggcagagaattgggccctttctagggacctttttactcatattgccagaactttttgcagctgctttaggcagaatgcagcctcacagtcctatcttaaggggaagcattgaaaccagagtccattgtctattgccttggaaatgctaaaaaagctcctcgtaaacctgtctgctgatttggctgtttgtccagatacttagtattagaatcactgaaccttaatgttggtgttgaatgtaccatttctgctacttctctagttggtatgggtccttgctgtcccatctgcataactgcctaggacagcactccatgtgttataaacattgcttgcatccaaggatagtggacagtatattggctcccccttcccctgccctccatattgccataaaattcccaaactattcagtacactttaatttccaagattattaatttgtacagatgctggggggagaggtagacaattaccatcattaaaatgctgcattactttatatcattgaataatgtcaaacattttttaaaatttttttatcatttaaaaacatctctttaagctggaagctctttgacatcctttggaacagaaacatcaaacagtggtaccttaccccaaagtagtgcggttggttctgcctttacacaggatacaagatctctaaaaacacagttatctcaaggtaagctatctcatccctaaaatatttccattctaaacttttatagtggtttttgtctttctgaatgtaagagcttttgcagcttgtaaatcgcgtgtataatttctatttggctcttttaaaatttttctccaaatcgctgtattgcaatgaatatattattgaatgactctcactatttagacttattacagttcttagatcatgaaactgaaatgctgagcattctctaagttggactttttttgcaaagcaattatataacttgtatgtaacacttaaatatatcaaattaggctcatactcaccattaaagttgagctatccaagatgaattggaaatatcatctgaaaaaaactgtattatgctgttaacattttccctaacatcctcacaggatggagagtagtggttctcagtgtaggctacccacaactgaatcatctggggtgcttcttaaaaatttaaatcctgagacttatacatcagaatccctggagcctgaggatttatattttaataagcttcttaaaggattgttttatttcttaagattctgctcttcaaccagccagtctcataattttaaatggttatccataccttttattcttatctttgtttcttccttttttcttaatctttttctttcttttatttacttattagagatgaggtctccctgtattgcccaggctggtctcgaactcctgggctcaagcgatccatttgccttggcctccccaaagtgttgggatgttgggattacaggcgtgagccattgggcctggctttttttttttttttaaagataggtctcactatgctgcccaaactgaaatgcagtggctatttacagatgtgatcatagtgcactgcagccttggacacctggccccaaacaagcctcccactttagcttccccagtagctggggctacagccttgtgccaccatgctcggcttttccttatctatttttatgcactttagaaatgggtatttttggctcattgctttatatgaatggtttttgttttgttttgtttttaagtaaaacaatgttgagtcatttcagaaagacctatagtcacaagacagtattttaaaaagctattaagggtaaaaattcaatgctaaacataatcttatgtatttcacttaagatattttgaaatagttcttactgttactcatattgattagcttaatttttttctttttttttttcttttaagatggagtcttgctctgtcacccagactggagtgcagtggcacaatctcggctcactgcaacctccacctcccaggttcaagcgattctcctgcctcaccctcccaaatagctgggattacaggcacgtgccaccacgcccagctcatttttttgtatttttggtagagatgtggtttcgtgatgttggccaggctggtctcaaactcctgacctcaagtgatccacctgccttggcctcccaaagtgctgggattgtagatgtgagccactgcgtccagcctacttgcttaatttttaaacattctaaagattgtttgtttgttttttgagatagggtcctgctctgtctcccagactggaatgcagtggtgtgatcatggctcactgcagcctctacctcctgagctcaggccatcctcccaattagctgagatcacaagcaagcaccaccagctagttttgtagggacggggtttcgccatgttgccaaggctggtctggaactcctgggctcaagtgatccacccaccttggcctcccaaagtgctgggattataggcatgagccacagtgcccggcctattctggaatttttagttaaatcaggaacacatgaaaaagaagcataaatattgaaattagcattattcatgaagaatgagaactaataaggaacttaaattaggcacaggcaaaatgtaaattaaatatacaaaagtcaatagttctggccgggcacgatggctcatgcctgtaatcccagcactttgggaggccaaggcaggcggatcgcctgaggtcaggggttcgagaccagcctggccaaccaacatggtgaaaccccatctctactaaaaatacaaaaattagccgggcatggtggcgtgcacctgtaatcccagctactcaggaggctgaggtgggagaacccgggaggcagaggttgcagtgagccgagatcacgctactgcactccagcttgggcgacagagcgagactccatcttaaaaaaaaaaaaaatttaatagtcctaaagcctaatccattgattatgtaatgaggagaaaagatgattacagtaatgcaaaatagaaattgtatacaaaatatataataagaaataagttggtcatactaagaaatatgaccaacttctatgataaataatgtaagacagggacataaaagttgcatgtaatggaaaaaacatatcttattgctagatagaagaacaagaacagtaccagcacttagggaggcaaagccaggatgatcacttgagcccacgagtttgagaccagcctgagcaacgtagtgaaacttcatctctaccaaaaaattttaaaaataagcagagtatgatggtggacacctgtggtcctagctactcaagaggctgagacaggaggatcacttgagcccaggaggccgaggctgcagtgagccctaactgcactacctcactccagcctgggcgacagaaccaagaccctgtccccccccaaaaaaaaaagatgttgggaagactttactcctcatagttaacaaatttattgcaaattaattaaaaatcaatgcaaatagaatagtaggagaacttagtaaaacagtttatctttaaaataaacatggaagtgtggctggacatatttgaaaaataaaagtaatgggtttactgacatgataataaaatgtagcaatgcaggaaaaaagaaagagatgaatagaaagcaataggcaggcagaaacagatccgagtataaataagaatttatcctgggtgcagtggttcatgcctgaaaccctaacattttgcgagttcaagatggaagccagggatttgagactagcctgggcaacataccaggaccctgtctctaaaaaaattaaaaattagttgggcgtgatgtgtgcgcctatcagcttgagaggctgaagctagaggattgcttgagcccaggaggttaaggtggcagcaagctgtgattgcggccctgcacactagcctaggcaacagagcaagaattcatcttaaaagaatttagtagatgataaaggtattattttaaattagtggagagaaggctgtctgttccaattaataatgttgcctgatcatttggagaaagtcactctagattctttccctcatactgagcaccaaaaaatatataaattttaaatagattaaaatgttaaaaattttgaagtatgtgtttattaaaagaaagaggtgtatttacataaagttatgacaaatgacaagtcctaagagtttgcatttaagttttatcaactaaaattgctgaatttcacaaaattaaaattcctagaattttaagtgtgataagattgtgaagatagctcaagggagtgtgtctataatatgcagaaatcacttctggatttattcctaataatgtatccagtatcacagtatcacctgtatttccctgtttataacaaaactggcatcatgatgattagtaggccttaatagtgaaaaggctttttaagtacacaacaaatgtttctgtacttgctccgattgccccattgcttgtacttctgtagtacttgtgagccataggatcttttctcaaaagccttgataaagaagttttataaacttataagatgatttaatgtagtaccataaaattaactgtagcagtaggctttttcaggaagacatgtgaaataaaaaaaattagcaaggtgtggtagcgcacatctatagtcctagctactcaagaggctgaggcaggaagatcattgggtcccaggagttagaagttgcagcgagctgtgattgcgccactgcactccagccagagcaacagaacaagaccctatcctgtccctaaaaaacaaaaaacaaaatgtgttttataagtgattataaaatgtttttttcataggccaaaacttacataaaccatgatttcccattataatccagtggaaaaattgtaatgcttctattagtggtaacttaattttgaaatgttaagtagattgtgcctgtgtcggtttctgggttttgataaatgatcatttatttggctaactttgccattaatggctgaaatggtattgcacatttgtaagtgcatactttagataatcataaattggggaaatattactaataaattatccctgaatcatctaggtacataataatgcattgtcagcactcaccagttgtttgacacctgcaaatatgcacagatggacagtaacatttgcagcatatttgggggatttttttacgtgaaatgagcattttttttaagcaaaacattatattttggaataattatgagatgtgagtgcctaagcagagatgtacagcaaacattatcaggacagaaagcatgatgggagcacccgatgttacattcttcagttcatgctgtgaccaggcgacctcataaaaggaaaaatataatgtataagtacaaaccccattttttgttttggctcttttatatttgtattttttgagacagagtctagttttgtcacccaggctggatgcagtggaccgatctcggctcactacaacctctgcctcccaggctcaagcaatccacccacttcagccccctgagtagctggggttacaggcatgtgccaccacacctggctaatttttgtattttttttgtagagacaggctttcgccatgttgttcaggctggtctcgaactcctgagctcaagcgatctgcccatctcagcctcccaaattgctgggattataggtgtgagcaaccgcgcccagccaaaccccatattaagcaaaaacttgccaagagatcttttaaaaggcaaggaatgagtatggctactgtgtaattatctgaagggttttttttgtttgttttttggttttgtttgtttgtttttttgctggccttttagtttttatgtttaattacccaagcccctaaagcattaaagaacttcacctatctaactttgtagttcttttactttatttatttatttatttatttatttatttatttatgagacagggccttgctctgtcacctaggctagagtgcagtggcacaatctcggctcactgcagcttctgcctcccgggttcaagctatcccatctcagcctcctgagtagctgggaacacaggcacgcgccaccacgcctggctaatttttgtattttcagtagagacagggtttcgccatgttgcctaggctggtcttgaaatcctgggctcaagcgatcctcctgcttcagcctcccaaaggactaggattacaggcatatgccactgcgcccggccctttactttcttataatagaaatttaatggagttaatacctgtagatagatgtaaaggtattgttttagtcatctacagaaagtactaagaaagattaaaacaagtcaccatagtcttatggttgtcattggcgaaagcctgtgtttgacctgactacaacatgataatttgtaggataattctagggaatctcgtacctggcagcaatttttttttttttttttgatgtaaactcttccactaagtagaaataacagataaaattgtgagggggagggagttgttttgaagctgttgaagtttttttttaaattattattattttttatttttaacctaatgacaagcccactaaggataccattcttaatatctggtctgataagtggattaattcaaatttgtgctaagggtttgaattgatagaaataaaactctggacaattttttttagggtctagattattttgaaatccccaatagggtagtttgttatcttttggttacattttaggtcgctcaagccctcagttagaccctttgagaaaaagcccaaccatggaacaagcagtgcagaccgcctcagcccacttacctgctccagcagctgttgggagaaggagtcctgtatcaaccaggcctttgccatctgccagccaaaaggcaggagagaatcaggagcacaggcgaggtagaactttagctgtttactgttccttaattgactgatcaatgttttccactcactttattttcattagaaggatttacttcatgtgaatgatcccagaaaattaaactgaatatgatagaatgtttggtctttcaaatttgactcaaagtggtggtggtgtgggtatagttttttgggcattgcacaggctttgttttgggttttttggtttgtttgtttgcatttctaactatggaagtttttgatgatgtaccctgagttgatttggcactttgcatgtcttcttctgtagctgaagtacacaaagtttcaaggccagaaaatgagcaactcagaaatgataacaagagacaagtaggtaagttcttggatctaaaagtcatattctatgcttctcaacagggagaatattttaaatatatgatacataattactataaaaaaatgaaaggcgggggttgtgactgtaaaggaggagcacaggggagtgtcactgtggtgacagaacagtcctttatcttgattgtggtggtagttttgcaaatctatatatggtagaacatcatagaactatgcataaagacataccaaaaaatgagtacatgtacaaactggtgacatctgagcaaggtctgtagtttagttaattagattgtgcctgtgtcggtttcttggtttcgataatgtaccataattatataagatgtgactgttggagtttgggaagttgggtgatgggcacaagggacgactctgaactagtttttcaatttttcttttctataattactttaaaataaaaagattttttaaaattttacttttctgggcccggcacagtggctcacgcctgtaattccagcactttgggaggccggggcgggcggatcacgaggtcaggagctcgagaccagcctggctaacatggtgaaaccccgtctccactaaaaatacaaaaaattagccgggcgcagtggcgggcgcctgtagtcccagctactcaggaggctgaggcaggagaatggcgtgaactggggaggtggagcttgcagtgagccgagattgctccactgcactccagcctaggcgacagagccagactctgtctcaaaaaaaaaaaaattttacttttctggaaaaaaattctacttagtggtaggcctttttttttctgagatggagtttcactcttgttacccaggctgtagtgcagtggtgtgatctcagctcacggcagcctccgcctcccgggttcaagtaattctcctgcctcagcctccctagtagctgggattacagccgcgtgccaccatacccagctaatttttgtatttttagtagaaacagggctttgccatgttggccaggctggcctcaaactcctgaccttattttccacccacctcagcctcccgaagtattgggattataggcgtgagccaccgcacccagccaggcagttatcttttaatatgttcttgagtatttcctgctagaaggatttgttcgtttatatttacattttcctatggcttctacttttgtggtttttatgttttgtgtcagtttcaagttaggattataaaattggttttcattgttttctatgcctttgggaatggaattttcttcatgttacaagtttgaaacgtttcctcattaaaattaagcccagaggccaggcacggtggctcacacctgtaatctcagcactttgggacgccgaggcgggcaggtcacgaggtcaggagtttgagatcagcctggccatacggtgaaaccctgtctctactaaaaatagaaaaattagctgggtgtggtggcacacgcctgtagtcccagctgctcgggaggctgaggcaggagaatcacttgaacccgggaggcgaggttgtagtgagccaagatcgtaccactgcactccagcctgggcaacagagcgagagtctgtcaaaaaaaaaaaaaaaaaaaaattgagcccagatcctgtttttgaatcagttgtttaagagctgtagttttcttttatgattattgatttaataaggttttatattttctttatctgttttgtaatatataacattctaaaatcattcattttattaatattttcaaatttattaatggaaaataaattataattttacaactcttctaaattaaaaagggaatgtataatctaccttatttagaaaatgattgaaaaatgatctttcacttaattttagaaatctagatatgatatttttagatgtatatgtactcttctctacatttatatatatatatatttttatatcccccccccccgtgttttttttttttttttttttttttttgagacagagtcaacctctgtcacccaggctggagtgcagtggggcacgatctcagctcactgcaacctccaccgcccgggttcatgccattctcctgcctcaccctcctgagtagctgggactacatatgccatggaatacagaattttgtttaatttgactcattatattttaccctttttattcagaaaaagagagagctcccctcccaaaataaaataactgccatactatctttcattgcccttcaaaactcaccccaccaaagaggttcattaacagaacagtgcatattcttcccgattttttttgtagattttacagacacagacatctatacccaaaacctttttttttttttttttttttccccctggagatagaatctcgctctgtcacccaggctggagtgtagtggtgcgatctctgctcactgcagcctttgcctcccgggttcaagccattctcctgcctcagcctcctgggtaggtgggattacaggcatacgccaccacgcctggctaatgtttctgtatttttagtagagatggggtttcaccttgttggtcaggctggtctcgagctcctgacctcgtgatccgcccgccccggcctcccaaagtgctggggttacaggcgtgagccaccgcgcctggccccaaaatatttttttttaagacagaaggatcatggtgtaattctggcttgtggccgaggcatttttaatagtagaggtgaatgtttcaaacatcctacttatctagatttatgtctggatatgctgctgtggggttttgtggtttgttttctcaaacccaggcagtttgccaaacctcagcaaacagcgcaaacctatcttgttaccctgtagtcacttctcatccttgtcagtatgtgtggagcatttcacgcaattgtgatcattaaactcatactggtttctgttctgcgtttttcagttaacatcaaatattcttcctctgtttttttcttgttagtcatttttcttgtgttggatatttgggttcccacgtttttcactataaattatgctgctttgtattgctttatcatgtctcttatgattggctgaaattttactgtgttatagaggagagagaatgtgtagatacaggaaggcttgaataatatagagccatctggagagacacagtaaagatggagtaggaagtgttttgagtcagtaaggattggtgcttgtctgttttttatctgtgatgtggaaataacacctattttcttgcaatttgtgccgattagtgtttatttttcttactataaatcttggttcctgttattctttccataaaaggctttctacattttgagaacccactgtgtgtctggcacttcagtttgccggtgttggggatatagcagtaaggaaaacaaagcccctgacctcaaggagcatacattaatttagtgcagaagcctccacacttgcctggctgtatactctgtcagtaacacatgtgagtgtggactccataaatacaaatgtttagaaattttgtgtgagctattctcagtctacatattaaatattagtgaaacttaattttttattttgtataaaaaatacaaatacaataaaatatatagagagacctgtaagcatttctgttgttgactgttgaatctaaagagcacaatagcaacatctgtgctaaaccagctattacatattgaatgtcctttgtatatattctttattatcatagctccaggtgctccttcagctccaaggagagggcgtgggggtcatcggggtggcaggggaagatttggtattcggcgagatgggccaatgaaatttgagaaagactttgactttgaaagtgcaaatgcacaattcaacaaggaagagattgacagagagtttcataataaacttaaattaaaaggtaagctttgatttttcttttcagaaaataatcttatttgatctgtgaattacagatgtttctcagattaggtgtttttatgtaattcagattagctgtcttgacttttctgatatgtgcttttgttcttagaagataaacttgagaaacaggagaagcctgtaaatggtgaagataaaggagactcaggagttgatacccaaaacagtgaaggaaatgccgatgaagaagatccacttggacctaattgctattatgacaaaactaaatccttctttgataatatttcttgtgatgacaataggtacagtttttaagctgttcttttatcttatgatattgattgaagtgtaaaatggtttcatgtaaattcacgaggtttaatgaatactaccataattgttttgttttgttttgagacagtcttactctgttactcaggctggagagcagcagtgcagtcacagctcactgtagtctcaagctcctgacctcaagcaatcctcccatctcagcctcagtaaaggggactacagttgtacaccaccccacccggctaatttttttcatttttttgtagagatgggggtctcgctatgttgcccaggctaatcgtgaactcctggcctcaagatcagcctcccaaagtactaggattacaggcgtgagccaccacacctggccataattgattttttaatgttttatttgctaaaagaaaatatatactaaagttctaaattattcattcaaaagaagaaataaccatatacttttgtttaaggatatattcatatttgaatattagcaattaaaacaagcatttaggtaatgtctaagtaggacctttttttcacccctgtatgttacagttcaaatgaagccagaaccgaagtgctaatctactttgaagtttgctggtaccataaaactgccagattgtagtaaatgtgggtccagaaaattggcaaattattgagaggttaattaaaggacccagtgtgaggaactaacagttctagaggttctcctgcccaatccaaattgtcattgtccttgtccttttcctggctgaagtttggtgccctctggtggcagttgtttgcttcaatataaacatggatggacataattctgagtcccacgattggctggatgacagcagcaataattcagatacttcttgggttacttggtatcgggtccatagattgggccaggaacataatggggacctaagggcccaccttccatctcctagcttcccaagacaaggcctccctgtctgactttaccttcttttcccttggggctgagtggaaagcgaagtcaattaccaatctcattatatctgaatttccattattttggagctgttactatgtttatcaggtgtatttgcaagaaactaatgtcagtcatgtgttcacatgaagtttaacagaatattacaggaacatattgaactcatatgccatgaacaactcgtgataacttagataagatgcttttttttttttttttttgagatggagtttcgctcttgtcacccagactgtagtgcagtggctcgatctcgactcactgcaacctccacctcccaggttcaggtgattctcctgcctcaaccccccaagtagctgggattacaggcacctgccaccatgcccagctattttttgtatttttggtagagaatgagtttcaccattttggccaggctagtctcgaactcctgacttcaggcgatccgccccctcggcctcccaaagtgctgggattacaggcgtgagccatcacgcctagccaagatgcttatttctaattagctttagtaattacttaggcttaatttgggagtagcactgcatattttggctgagggatattcttttaaacctgatatgctgaagattatttgcttttataatagagaacggagaccaacctgggctgaagaaagaagattaaatgctgaaacatttggaatcccacttcgtccaaaccgtggccgtgggggatacagaggcagaggaggtcttggtttccgtggtggcagagggcgtggtggtggcagaggtggtaccttcactgcccctcgaggatttcgcggtggattcagaggaggtcgtgggggccgggagtttgcggattttgaatatagggtaagtgttactgttaataaattctttggggttgacatgcattttacaagactcaaaacatttttacttgtttttgttttgggtgaattgttttgaggacattagaataacttccattttgacttttcagtagaggatatacgtgattcagatgtatatataaagacattatacaaaaaaagacagtatagtatcacctttatttcatgttaacagaatatacttttaacacccaaagagtctatctaggaagcacatactcccagaatggaagggcaagctttaacatttaatagcagttaacatttatatagtatttaccaagtaacaagacattgttttaaatatttttttacatattaacttatttaaactgcacatcaactctgtgaggtaggttctattattatccccattttacaagtgaggaaatgggtatagagatattaagtaacttgcgaaaggtcacatagctagtaagtgatggtgctgggtgttgagcccagcaagttgtttcctgagtcagtactcttaatttggttttgttgaaaattcactacattttccctggttttctcctttcaccatgaaattgaaaatgtttcgatatattggccttcaggagctactgctagagaattctgtaactctgtatagtagccttatgtgtataatgtagcttttgacaggtgtctgtaaattaagtcagcatagtaactatctcagttaacagtaaactatcttagtttattgattttagaagtagtggagaggaagggctataacagaaaggaccaaaatcttgtaaagagttccacttgtaatagcaacaggcagctggaaacagaaagacctgttagcaggagttccattgcccagtacttaaaactggccattgttgagatctctctggaaagagatcagtattagtggcttttggacctgctctattaattttaatgcttttgatattgtgccatcacagccaagactgccaaaaattatactcaagtcaccagcttatgccatccagccgttggtggccttatgtagttgcgggacttctgacttgcaaaatcaccttcccagctaggagaatctgtcttaggaactccagaatagccctcgcttatcactgttactgcccttaagtttgccagtgacaccttgcttacagaattcagcagtagtattttcacaaatattttatttgccattaactcctctgcaatatttgacactgaccaaccacccaatttggggtctttcttcctagtctttaaaatactcttctaggttttcaatttatactcttcctaattttttaatactcttcattcttttttttggggggtggagggtgtcagggtcttgctgtgtcacccagactggagtgcaatggcatgatcataagtcactgcagcctcaacctcccaggctcaggcagtcctcccacctcagcctcctatgtagctgggactacaggcatgcaccaccatgcccagctaatttttaattttttttgtagacactgggtcccactctcactatgttgtccaggctggtcttgaactcctgggcttaagcgatcctctcacctcagcttcccaaagtgctgggtttataggtgtgccatggtgcttgttccatcctcccttttgtaagcctgtcctggaccctatgtgtttctgcaccgcatctctatctgcactgtttgctgtcagcttaaccttcctcagactgatctcatcatcttccttctctcctgtcatctcagctctgcctcctcccagtgttccatgttggctcatggtatactgcccaggcactagaggtatccatgattgtggcctgttgccatttattcctttgagatgtccctgtcaactaccatggtaacccaccagttgggcttcagaccttcgtctctctttaccccactttaaggcagatcagctacattttgaacaacctgtgacaactccttgttgaagaccacattgagtcagcttggtctgagaaaaagtacatttaaattagacttggatccagatgagaataatagcagtagttactagtatgacctttcagacccttggttttgacatttgtgaataaagagttgcaccatttattctgaaataacaccttttaaagatcattaaactttcagagttggaaaacatctgagaggtctgacctggttaaaacataaacctcttctgcagtatctcttataggggctgggagcttactcttcccaagggcatccatcccaccccagggatgttctaactgttacaatctcagctgggcgtggtggctcacacctataatcccagcactttgggaggctgaggtgggcggatcacctgaggtcaggagttcgagaccagcctggctaacatggtgaaaccccgtctctaccaaaaacataaaaaaaattagccgggcgtggtggcacacacctgtaatcccagctactcgggaggctgaggcaggagaatcattgaacctgggaggcagaggttgcagtgagccgagatcacgccactgtactccagcctgggcgacagagcaagactccgtctcaaaaaaaggaaaaaacaaaccttccatgcagtaactgtgtgtgctccatgtggttactaatacaaacatttttttgacaccatgtcacactgtttatcattttgagccttttgtaaaactcgtatcacatatattgcagaattgaaaatgcattgtcatagttacctccatgcatctttgtctacgctcctgtatccttgacagatagtccagcctctgcttaggtgttgccaggagtgatggactcagcgaaccctcaggcatggcccagtgtttaggaggctcagttgtgacattgtagtccctgctcttcttaattgtgtgaggatcccacttgatatatttggcctcattcctcattaccctttaacctatctgattcaagcaagctgcctcatggttatctcacatacacattgtgcttgattccaactccatccccattcatttaccaaatatacagaattcttcagatatgccaggcactatgttgagcattggtgctgaccgatgtaggcccagcccttttgatgtttacattttggtgggagacagacatagctaaaagtcaggtcccccctttcacttatcctttacagccttgcccaagttttgctctgtcttctcttccttcctacactgatttcctcctcttctgacctgtggctatctgctttctttggcacacattttaaatacactgacattccctattttttgtatttagttttgttctgcatcaccagctagatgagaacctcttggctttagtgaatatgtattctacttttctttccatgacaacactcagctcaacatggagccatagtgggcttgaagtaattgcttgtcatgttgattaggaatttgccactccagccttcagtgagaccaaaggtctgtcaatgtagctagcctttgattgttcattccagagttgaataatcctttcatctgccactagagccccgaacccagcagccctacacctcctaaatcataaaatcatttcacctggcacctttaaaggtagaaaatggtgagtgatcactgtcacataaaggagatttaccactgaagattaaacttgtatctgaaacatctaacacttcctcccagagatggacatggatgacatttctgcagccttcatgaaatgagttggctttattttttgtgctatattagcatgagtcattgtggtttgggggtaagcataaatgagcttggttgtttaatgaaaacatgggtaaagataaaatcataaagttttagaatccttaaaagaatcagccaaactagaatctctacgctaccacactcacattagatgataaggaaactaaggaccccaagaagttaattgtcatgattgaggtacaagctaacaaatccaaaactcactctcttgacttgtggcctgattttccttaagggtaatattgtaaatataggccagtgcaatggtgtacacatgtaataccagcattttgggaggccagggcaggattgcttaagcccaggaattcaaggacagcatgggcaacataaggagtccctatctctataaaaaagtttaaaaattagctggagtggtggcacatgcctgtagtcccagctactcaggaggctaaggcaggaggatcagttgaacctgggaggtcaaggctgcagtgagccatgatcgcaccactgcactccagcctgggtgacagagcgaggcctgtctcaaaaaaaaaaaagaaaagaaagaaatataaccttatggtaagtttggttgtatggtgttttccccctcccaccgcccattcttttttgaggtgagaatggaaatcaggactagcaataataatgtaaccagctcctgttttatatgctgctgtcagggaggttaagccaccatggtgggtgataaaaatcacatctgtgtttcctcagatggggttcaaagacaacaaggtgtctgaatgactcagcataatgctctctctcctctccccctttcattttctcctttctccctctcctgtccccatctctttctctttttttttttttttttttttttacctttcagaaaaccacagcttttggaccctaaaaggtctggattgatcgtactgctttctgaaaggtaaaaaaaacaaatactttgggaggtgtgaaggttggctttgtgggggacagcaggttcatcttgtagctcattgctgtcaacttatgccataccatatgtatttcagtttaataacggggtgcaaatgttttggtgttgtatacacagatgaagttaagtctcacctaggaaatgtctgtttctaacagttggggtgagaatcagcagtaaaaaccaggtatatggtagcagctggtctagaggaaaataaaagcccttggctccagccctttgtacaggcctttagtttagggtcagtctctctggaaatcttgagatttttattgcttcctcactggttactttttaaaaattccccagtcagctttctacttttcagagcttatttcagatttaagagttatccttgtaaaattgatttttaaaccattgcttcctcctggcatgaaattttggagagaaatgttatactgactgggtattttattgcttagtaaagacatcaaagacttggggattttatgaaacttgtttcaaagtatgttgacagttgtatttgatgagtttgactattgagttgagggtttaagtcctatcactgcttttaaaaaattattagggagaacaaccaaagatgaggaagtatgcctgtattttggggtggggttcaccactgcattaacctctactgactggaagatgcagtcaacaatgaggtactactgagtatggaagttatagaaggagtttcgtggaaatgagtgagacaggtttttctatgaaagtaaaagtgggggagtatatttaaagataatttaaaataaacttgagcaaagtaaaaagaaaataatacaccaataatttggaacatgagctaaatttttttttcttttttagaaagacaacaaagttgctgcatagtctacaaacaagtctctgaaaataggtgaatttctagctcttcatggtcctgaacattgatttcagtctttgcaaagaatgaagaagtgaattcgctgtacatttgtcaccagcactgggtttttgttttttgtttgtttttccgcttaatttcaaagataaaatgcagttacttttgggggtggaaggctcatcttaaaacatgagcattaaatatatttggaatagcagaaggttaagtaatttcttatgtatagttaaactaaagcagtacttcagtgggacttaacaagtattttttcatcactgaaaggttttttttttttatcactaaattgtatttggcaattgcaagttgcctgcagatagggccgtgatactgtgttttgagccacagaaggttgtgtgtgtgtgtgtgtgtgtgtgtgtgtgtgtgtgtgtatgtgtgtgtctttttcctcctttcttttggggaatcctgtaatatgaggtagcttatttcgtcaattaattagggtgctggatggtagagaattttgtcagtcaactatgtacacacagtaaatactgtttcttaggcaaaggtaacttttttatatagttgtaaaattccattatattccattgccaaagaaacattaagaactttgtatagctgtataaaaagcaactaattttttaaagaataaacattttaaagtcagcaaacatactgtgtccttgcagaagttgatgtgctgagcagcagccttatgggtgggtctttttttcttagttttccaggcttaacatttttgattttgttttttaatgtttggaacataaatgaagatttgatacattatttcattatctaaaaaggattaattattcatgctcattgtaagaacttcattttgtagcaaatggcatatcacaggatctgtccagataatcgatattttcagtatacaaatgtaaataatcacagatgagaatgtacttagctgtattttcaaataagtaatcttccccccttttgtaggactttaaaactaggcatcaatgaacctgtttttcctattatgcctggaatttagtcatgataccttgactcattccatcatatttcaagaggattcagagtgctagaaattattttggtagcctgtaacacacggcaacactggtccttgggcctatgatgacccacagatgactcagtatagagttcattgctaattataaattactagtgaatctttttgatattttaagctctagtgggaaaaatctggccacttttgtgtttttatgaaggccatggaataaaaggatccaaagatttaaatatttttatctaatattttgattgttttcttaactttctccttaaaacattcagtagtgataaagatatagaaactgcactgtaggagaattggaatatttaaggctggttgacattttttattttcattttatatcttttgtatagctctacaaggcagtgttttgtaatttggtttcattatgaagatccagtacttggcagccatagtttagacaatattgttcagtgctgtttgcttgcatgttaacaacaaaaccttttagaggacccacaaatcatgatattgaacacagttccgaggcattcagagcatcagagcaagtaccatggcaatacatgtgtagactgttggagatgtcccgggccaatttcaagaaagaaaactgtaaatactagttctacttgctctgaaattatgagtttatgcgttttcccagccctccgaatcactgactggggcgttttgtgccccagcaataactggcagcatggcatacctgcagtaccccttacaatattaaagcaaagtttttattctaaaacagaataaaactgttcaataaaaaatgctcgtcaaagttctttctctttaaatagtaacattctgtttcagtaggaacataatgaaaggaatcttttaaatggaagagcggaattataatgtttgtattccctgtaataactataaatcagttactttatttctaagattgagttattgttgcagatgtttagggaaagctaaaagccccttccttcccctcctgtgtgtaaataaaatacttctgagatcagatccgtgacatgaggagattgagccacccaggcacaggccaggctggaaacagcagccagaacacactccctgtgggcagacgcatgaagaagatgcagaatctgtctattaaaacagttcgctccaaaagctgggcttcatgtgatggtagggcaagaggtcgggaacagcagtgcagcacagtggctctcggtggggttacctgacatcctaggaacacagtcatctgttgcttaataatagcgacatgttcttatttttaaatagcaatgaggtctcacttcgttgcccaggctggtctctaactcctgggctcaaatgatcctcccatcttggcctcccaaagtgctagattacagacatgagccaccaggcccggccatgacacattctgagaaatgtgttaagcaatgtcatcattgtgtgaacatcagagagtgtactacacaaatgaagatggtatggcctactccacacctaagctatatggtgtagcctgttgctcctcgctacaaacctgtacagcatgttactgtactgaatactgtaggcagtcataacacagtggtatttctgtatttaaaacatatctaaacagaaaaagtatagtaaaaatacggtatcataatctttgggaccaccattgtatacccagtccatcgttgaccaaaacatcattaagtggtgcgtgagtactgaggaatgtgaggggatgtgttttggttgtcacaatcactggggatcaccactggtatttaaaagtaagggcccggatggtaaatgtcctgtgctgtgccacacaatcagttgtccaacccaaagtgcagtagtgctcctctactctgagaaacactggctaaagtccctccacatggaaagacagtaagtgggaaattatttcctgccaacttgaaaaaaaaaatttactacttaggaaattgtccgcttgggaatattaataataaagggaacttacttcctgtagcacatcagcattgtggaaacattaccacataggagttagggcttcatcctgttctctgtcagtgcttcacaaatctctgatcagaatctaccaaggagcatttttaagtacagattcccaggcccagagagtgattctgaagttccctagtacagcagaacccaacctttttggcaccagggactggtttcaccaaagacagtttttccacagatgagcagggggtatggttttggggtgattcaagtatatttattgtgcactttatttctattattacattgtaatatataatgaaataattacacaattcaccatcatgtagaatcaatgggaggcctgagcttgttttcctgcaactagatggtcccatctgggggtgatgggagacagtgacagatcatcgggcatgatcagtgagtgcgcaaccgaggtcccttgcatgcagagctcacgatagggtttccaaccctatgagaatctaatgctgctgctgatgtgacaggaggtggagctcggatggtaatgctcactcatcagcccgcctctcacccgctgtgcaggctggttcctaacagaccacggaccacgaccgttctgctgcccagggatcagggaccccttctctagtaggtcctaggaatcttactgatcccacaggtagttgtgattagctaggtttgggaagatgactgtacaacaccaaagctggttcctgctttgggggtgttgatatattttccacagtaggattatcttagcatttttcccatccttccaaacccagtatatccagattgtgactggggcatgaagagagggatgggactaagtggaaaggagggaacagttttgcaggatggaatcaggggaaatggggaggttgagactcgagtttcctccagagtttgggtgctttgagtactgagttttatttcgtttttattcctggcatagggtttgtgttccttctgtctcttaattttgcatgccagttgtccctgcctctgtgggttctctgcccatcagagaagccgctccttctgcagggcccctctgtccacagcatggctgagaagcaacttcttttcctgagaagggttacttaggccatccaatcacatctggattcagtgtgttgcaggatccccctgccctgttagttcagagattaagctgttttacatagtaaaggtggggagagtgtcatggtataaagtaatccaggtgaatggtctcttcctgtaggagtgcaggtgtcaccaatttgctttagtttacctgtcccgactggttttggggtttttttgagacggagtctcactctatcacccaagctggagtgcagtggcgcgatcttagctcactgcaacctctgcctcccaggttcaagtgattctctcccctcagccccccgagtagctgggattgcaggcgtgtgcccccacacccagctaatttttgtatttttagtagagatgggatttcaccatgttggccaggctggtctcgaactcctcacctcaggtgatccacctgcctcggcctcctgaagtgctgggattgcaggtgtgagccactgtgcctggcctgttctgactctgtttaaaagataacaagtattaggctgggtgcggtgactcacgcctgtaatcccagcactttgggaggctgaggcgggtggatcacgaggtcaagagatcgagaccatcctgaccaacatggtgaaaccccgtctctactaaaaatacaaaaaattagcctggtgtggtggcgggcacctgtaatcccagctacttgggaggctgaggcaggagaattgcttgaacctgggaggcggaggttgcagtgagctgagattgtgccactgcactccagcctgggcaaaaagagcgaagctccatctcaaaaaaaaaaaaaaaaaaaccacgtattattagtaaaattgaaatcaaacttagggaagtatcatagtaccattaatctgtcaatctgaagatgctaaaaggagatttgcttagcaggctgccttggcttctccaagatggggagacagacaacttcttggaagcagtgtcctccaaacagaaattggtcaaggaagggaagtgggagagagagctttgactagcagaggcttggaagccagccagccagcagccaacagtgcatgtgtgcattgggaagctagtggtccagggaccaggcactgctcctgtgggatccatcccagccctctaaggagcggtgcaaaggttcttatcctatttatcggagccagtgtccagaaaaggaagcttgtggtttgagacattctgtaaatccggttccaagagcacgaggtaggactctgaatccgatgtggtttctgttctcggtgatggtgcagagctgtgagccagtggtagggtgtcctttaaattccagctcagtacactagttaatgaacttggctgactgataaaaatgttttcaggtttagctcatgaacatatcaacatagacctaaatataattccagtttgtcatgaatgttgattttttgaggaaatgctttaaaatgtactgatgcccatgttgtggttgtaaggaaacaaagcagctctgtgaggccaaagcatatttcagttcaatagtgaggctttcttagaaagaatgactcatagtcactcagagttgagtcgcacagaaacaaccgagagcagacagcaaggaacggcagggcccagaaggtccagcctttccctccaggctgaagggttagggaagatcgccaaccttaaagggggtgtgagaggcctgggcccaggtgagattgtactgaattccagtaaacagtgtacagtcattccaggacagaggacaggaacatgtttactaggtgtctggagtgcacctctataatcctcatacacactaatccagataatcctgggatgctggcctcacgcaggattgttgatgagaatgcaaatcccaacattgcaattcaggattttgcttctactgaaagcattttgtcaatgttctcttttggggttagctgggtgacagttctcccttgctggattcccagtacttaatagcgtttctttgactcagtggatatgtggaacattgcagactgcaatttataacacagaactgggtatatattttcattataaaagtaatacatgtaaaaagaatgcaggcctcttctctgattgggtggtatttttaaaaagaaacaaagaatgcaggcagtgtagattatgtttgttttttaaaggaaagagaagaaaaaattctctaatcccaccacccacagctgaccatgttgacactatttgggtgtatattctgtctggcattatcctgtacaggcatatgctcttcagcaaaaatggatttggccgggcgcagtggctcagcctgtaatcccagcactttgggaagctgaggcaggcagatcacttgaggtcaggagttccagaccagcctggccaacttgatgaaaccccatctctgctaaatgcaaaaattattagctaggcatggtggcgggttcctgtaatcccagctacttgggaggctgaggcaggagaatttcttgaacccaggaggcagaggttgcagtgagccaagatcgcgccattgcacttcagcctgggtgacaagagcaaaactccatctcaaaaagaaaaaaagaaaagtagatgggcacagtggctcatgcctgtaatcccagcactttgggaggccaaagcaggaggattgcttgagcccaggaggttgaagttgcagtaagccatgaccacaccactgcactacagcctgggtgacagagtctaaaaaaaaaaaaaaaaaaaaaaaaaatccacatttctaaatgggaaaatctgaaggccttgatctgctgccaagggtcattggctgtgtcttttgaaacatttttattatgaaagtgtcatgtggttataggatatgagctgcttcagcccggcacggtggctcacacctgtaatcccagcacttttggaggctgaggagggcggatcacctgaggtcgggagttcgagaccagcctgaccaacatggagaaactccatctctactaatcatacaaaattagctgggtgtggtggtgcatgcctgttatcccagctactcaggaggctgaggcaggagaatcacttgaacctgagaggtggaggttgcggtgagccgaggtcactccattgcactccagcctgggcaacaagagtgaaactccatctcaaaaaaaaaaaaaaaagaaatgagctgcttcaaacaggtcctcactaaagaccaatgactggcattgcctgagcaacatagggagaccttgtttctacaagttatttatttatttatttatttatttatttatttatttatttatttatttggagccagagtctcgctctgtcgcccaggctggagtgcagtggcacgatctcggctcactgcaagctctgcctcccaggttcacgccattctcctgcctcagcctcccggcagctgggactacaggtgcccgccaccacgcccggctaattttttttatttttagtggagacggggcttcgcagtgttagccaggatggtctcgatctcctgacctcatgatccgcccgcctcggcctcccaaagtgctgggattacaggcgtgagccaccgcacccggcctatccaagtaattttttaaaaattagctgggcgtggtggcgcgtgcctgtagtcccaactacttgggaggctgaagcgggaggatcacttgagcccaggaggttgaggttgcagtaagccatgaccacaccactgcactccaacctgggcaacagagcaagaccctgtctccaaaagaaaaaaagaaaagtacacatcataattacctatgtaaccggcacccagattataaatcagattattaacagtaccccagaaacccaccaagctcccttccagtagtccccatcccttcaaggctaactacagtcctgacttctgacaccatagattacctttggtgtttttatataaatggaattacacagtatatactcttgtgtttggcctctctactcagcattgtgtttgggattcatctctcttgttgcatttggccatggactgttcattttcattgcagtataatattccattgtgttaatagaccacagttgcttctttctactgttgatgccgcatttgggtggtttctagcttctggctattaaaataatgctggtactgttttttccttcgggagagaagccagaactagagtgggtgagaggaatgctgacctagccctcttgaggacttggagcatggtgaaccatatggtagtgctctgcttgtcactaaccataaagtaccatacaaccctgatgtacagtagacatagatgtagataatggtatatattagagcagatccagagtcaatcctccgtgtgcctagcctcagtcccctaaggacagtgctcccccattgcccttactcactggcagcagtggaatatttcttgccctacaaaactgtgttcaggatgtggatgcggtctccttgcttccctgctgataaaaactcctaccccagtgaggttatgtgatcctctcactctcctggtgatgaccatttaatgacctgatctctgcccatcatatcgtgagaagtctgatactcatcttcctcttcctctccccttctgtcttattcaaagtgacttcagctgttgtgtgatctacccatctgtactgggggtccccagggtaatcgcacgcatggctatgacagtgtacagtgacaggatacagtgacaggatacaaagcaaaattcacaaagggaaaagatgtgtgggcaaagtctggaggaaaccaggctcaaacttgcaacggggacttagaaagcggagcctcacgggatgtgcttagcttctccagcagggagttgcaacaacatgcgtgggatattgtctgccagggaagcttcagacttagttgcccagggtttttactgggggctgattatgcagacaccctctgcgtggcacgtgccaaaattccaggctcccagaagtaaagcacaagcaaaccacattgtttacaacagtctggatacagtgcaccactcctaccagttctgggaatggcgggaaccctcctgaaatccagatgtcaggcgagagccaaacttacaagcaggccttgtaaatgacagcagtcaaacctgcttcgttaactcctctgcacactcgcccacaccctggcttccgtccttgtcctgtgacattttcctgttgtcccctcctacccaaagctgtagacacacctggaccttgtccatcaacctcaactgcaaccacctccaaatcacagacttagacaccccgccctttgaccttccagctgtcttgctgaagaaatagctaaaaaaaaaaaaaaaaaaacataaaaaaattcaggccaggcgcggtggctcacgcccgtcatctcagcaatttgggaggccaaggcgggcagatcacgaggtcaggagatcgagaccatcctggccaacatggtgaaacctctgtctctactaaaaatacaaaaattagctgggcatggtggcacatgcctgtaatcccagctactggggaggctgaggcaggagaatcgcttgaaccccggaggcagatgttgcagtgagctgagatcacgccactgcactccagcctggcaacagagtgagactctctctctcaaaaaataaataaataaataaataaataaaaattaaaaagcagtgacctaacccattcccttccttagtaactgtttttagcctggtgcagaactccaggtccagaatctttatactttctccggcttcattagttcccccgtgctttctccaccgccatctccaaccatcctaaactccatgactcactcttcatttatcttgcaaataccctaaactcctttgcttctcttttgagaagctcctgcctagagaaacttcaaccctaaaagcatccattcatccacattgtcaatgtcttcacccagggggttgagtcctgaggacaagaatcacagttgagcaaatcaatgccactgtaaataatgctgattactaccctcaaccttggccctcaactttgtatatttatacctcaaccaggtatatttctttgtatatatatacctcaaccaggtgtatttctgtaatcactgtgcccttaactttgcatcaaaaccagtatatttctgtaatcatctctctgcagtcagcaagtggtcttaccatctatttcaaagacagctggtggctgttggatgaaaacagtttcagacgcttaccacactctaaaccagcctcatctgcatcccaggccctattaaaaggaggtaggggctgggtgcagtggcccatgcctgtaatcccaacacttcaggaggctgaggtggtaggattggattgcttgaggccaggagttggagaccagcctgggcaacatagcaagacctcatctgtacaaaaaatttaaaaattaactgggcttgctggcacatacctgtagtcccagcttcttgggaggttgaggtgggaggatcacttcaaccccagagactgaggctgcagtgagctagctatgattgccgaggcaggtaaatcacttgagcccacgagttcgagatcagccggggcaacatagtgagacccagtctctaaccaaaaaagagaaaggagattattctggggatcctatacctcccactcctgtttaactgtcaggattcctgaagtgaagggagacttcacttctcaagccacttgacctattccactgaaacagttcttggtaagatcaccaacaatctccagtgagcatttttgttttgagacagggtctcactctgtcactcaggctggaatgcagtggtgcgaacacagctcgtttcagcctcctgggcccaggcgatcctcccatctcagcctccagagtagctgggactacaggtgtgccaccacaactggctaattttttaattttttgtagagacatagttttgccatgttgcccaggctagtctcgaattcctgggctcaagtgatctgcctgcctcaacctcccaaagtgctgaaattagcacccagctgtatgtattatcttggttttgtttttgtttgtttacaattttttcccctggagtttctgattggctcttggatgttctctgttacttggaatctattccactctccttgtactcaccaactttctagtttaattcagaccatttcttctttggacagttattttctgtacagcttttgggttttcctggagtttctgaatgtttgttcttgctggtatttgttgcctttatcatattctcaagtttttccaactcctcacccatactataattcagtctacaaaatctcctttttttcatacagactgttcttccataaccttccaccattctgctaagatccaaacaggccaggcatggtggatgataccaataatcccagtacattgggatgctgaggcaggcagatcgtttgagcccaggagttcgagaccagcctgggaaacatagtgagatcttggtgtctaataaaaaagaaaaaaaattgaaaaagataaataacaaataaaacccaaatatattgcttccaggtgtcaacaaagtcatgatcctgagattttgccatcactgctctcctgggctacaattagagttgctggcaccatgttttccattcctttgtttactggaatttctccttagggagctttctagacaggaaggtctctgtcacatcttcttcctcgtttcttttttttttttgagacagagtctcactctgtcgcccaggctggagtgcagcggtgccgtctcggctcactgcagcctctgcctgccagcttcaagtgattctcctgcctcagcctcccgagtagctgggattacaggcacccaccaccacacctggctgatttttgtatttttagtagagacaggatttcaccatgttggccaggctggtctcgaactcctggcctcaggtgatccgcctgccttggcctcacaaagtgctgggattacaggcatcagcctctgtgcccagccccagccttctttgcttatttaacaacaaaacgtcgaagcaattcttatcttagttgctgacccttgatctagcatgcagtgatgttaagtctaatgccaatttgattttttcttttcattgtagattacctgtttcttcctctgtggaaacagcatattatcctttctgttaagaaatgttatgacttctcaagagtgtgggtctttttgtttcactccagtattatgctgggcagttgttaggcccttttgatttaatggtttgtgtcttccctttagcttgggtaatttttttcataccatcctccctgtactttcactagaagtctcttttactcagatataagagctgcccattcggccgggcatggtggctgacacctgtaatcccagcactttgggaggctgaggcggtcggatcactcgaggccaggagtttgagaccagccaggccaacatggtgaaaccccatctctactaaactacaaaaattacttgggcatggtggcacatgcctgtagtcccagctactcgggaggctgagtcaggagaatcgtttgaacgtgggaggtggaggttgcagtgagccgagatcgcaccactgcactccagcctgagcgacagagagaggctccatctcaaataaataaataaataaataaataaatccctgtatctcttagttttttctgctattttctttcctttgctattgttcatcttagtctctttcctgtagtaggctttattaaaatatcagtggattcttggctgtctgtcattagaaggaggcaaacgggtgccctggagctctctgtgtgaccaggatttgttaaccagcagtgtcagctttaaggtagtgatctttattcttgagatttccgaattccagagggctttgttgtaggatgccaatctctccagatcccacagatgtctacagagaagaatcttccttttttttcttttaatcctgatatttatttatttatttatttatttttgagacttgagtctcgctctaacatccaggctggagtgcagtggtgcgatctcagctcactgcaacctctgcctccgggttcaagcaattctcctgcctcagcctcctgagtagctgagattacaggcacgcaccaccacacccagttaatttatccatttatagtagagacagggtttcaccatgttggccaggatggtctcaaactcctgacctcaagtgatccacctgcctcagcctcccaaagtgtggggattacaggcataagccaccacacctggcctatttttattttttttttttttgagatggagtcttgcactttcgcccaggctggagtgtagtggcacgatctcggctcactgcaagctccgcctcccaggttcacgccattctcctgcctcagcctcccgagtagctgggactacaggcgcccgccaccacacccggctaatttttgtattgtaacagggtttcaccatgttagccaagatggtctcgatctcttgaccttgtgatccgcccacctcggcctcccaaagtgctgggattacaggcgtgagccaccgcgcccggcctatttttattttttgagagagagggtctggctgtgtcacccaggctggagtgcagtgacacgatctcggctggctgcaacctctgcctcctgggctcaagccatcctcccaactcagcctcccgagtagctgggattacaggcacacaacaccacgcccaactggttattaaattttttttgtagagatggggtcttaccgtgttgcctaggctggtctcattctggtctcaagtgatccacccacctcagcctcccaaagtgctgggattacaggtgtgagccactacgcctggccctgtgaggtatttttcagcagctttctagactgacaagagcagctggaagcatggcaaccccaggcagagcatagcgtgctgccgcctcgactgtgctcaaggggcgctagcgtgcgggaggagccacctgcctgggcctctggaaggcttctgcctctgagccagcaggtacaacagggaacaagagtgagaaggggacttgaaaacaggaaacctaattgaaggtctgcacaagtagtgaacaaacctgtttctcactgctgcagtcggcatggcttataattaagcagcatactgttacaaaaaacaaacaaaagaaagagtcttggctgggcgcaggtggtttatgcctgtaatcctagcactttgggaggttgaggcgggtggatcacttgaggccaaagagtttgggaccagcctgggcaacacagggagaccccatctctacaaaaaaaaaaaaaaaaaaaaaaaacaaaacaaaacaaaacaaaaaaaacactaaaatattagccagccatggtggcatatgcctgtggtcccagctactcaggaggctgaggaaggaggactgcttgtgcacagaaggtcaaggctgcagtgagctgtgatcataccattgcactatagcctgggcaacacagtgagaccctatctcaaaaaaataagtaaaattttaaaaaaaattaaaaattagccgggcgtagtggcgtgtgcctctggctccagctactcaggaggctgaggcaggaggatcccttgagcccaggaggttaaggctgcagtgagccatgattgtgtcactgcactccagcctgggcaacagagccagactctgtctcaaaaaatatataaaaataaaaaattattttagaaagaaaaatacttgacaggcttattcctgcccaattcaatttataactgtttattcatgtgttgacatcttaatgcagtctttttaaataaaagcaacttcattaagaaagtaaaggaataaaagaatggctactccataggcaaagcagcctttaaggcagtctttttttttttttttttttgagacgaagtttccctcttgtcgcccaggctggagtgcaatggcgcgatctcggctcactgcaaacttcgccccccagattcaagtgattctcctgcctcagcctcccaagttgctgggattacaggcatgcgccaccatgcccagctaattttttttttttttttttttgagacggagtttcgcttttgttgtccaggctggagtacaatggcttgatctcagctcactgcaacctccgcctcctgggttcaagtgattctgttgccttagcctcctgagtagctgggattacaggcatgcgccaccacacctggctaattttgtatttttagtagagacggggtttctccatgttggtcaggctggtcttgaactcccgacctcagatgacccgcctgcctcggcctcccaaagtgctgggattacaggcgcgagccaccgtacccagccagggcagtcttaaaggcaaagaaggtgaacatttgtgcttaatttcccatctagagtgagcaaatctctctgcctctaccctggttcaaagccccttcacctcttgcgtggactatgttaacctcctcattggttatcctctcttcatactgcattcttctgtgccatattctgtgcagaggccagaatgcactttggggaacacaaatctgattgtcaaattctgtcacatgtcttagagaaggcatctaatctggatgccttaagagatggtggccaggcagggtggctcaaacctataatcccagcactttgggaggccaaggcgggtggatcacttgaggtcaggaattcgagacagtctggccaacatggcgaaacctgtctctaccaaaaatacaaaaattagttgggcgtgatggcgcatgcctgtaatcccagctactcaggaggctgaggcaggagaatcacttgaacctgggaggcggaggttgcagtgagcccagattgtgccactgcactccagcctgtgcgacagaatgagactctgtctcaaaacaaaaaagaaaaaagaaaagatggtgtccttctggaagttgtattgccgcaactatggtctgatgggaatgagatcatggtgtcaaacagacccatgctaaggcagcccccaggcagagactcctctccccatggcctcagtactggtctagaactctgagtcatagatctaaaaataagtcacagggctgtgagctagcaggacagctgcacacctctgggtctgtggcaagccagtggtccgcagtggggatgccctatgtccagcactgctgctgctccttcgtctagaggccttccttgaccgataaagcaagcaatgctgggtagcccacaccccctataactttggcctggaggtgtccctggatcagatgcctgtctgagtctggcttccagactgtcaatggcttgctctgcagctttcaccaacccaggtcacgacttgtgcttacaacacctctttggccgggcacggtggctcatgcctgtaatcccaacacttgggaggcctaggcgggtgggtcacttgaggtcaggagttcaagaccagcctgatcaacctggtgaaatcctgtctctacgaaaaatacaaaaattagccatgcgtgatcaggtggcacgcacctgtaatcccagctactcgcgaggctgaggcaggagaatcacttgaatccaggaggcggaggttgcagtgagccgagatcgcaccactgcacgccaggctgggggacagagcaagactccgtctcaaaaaacaaacaaacaaaacacctcatgtctgggccagcctgctttcctcctcttttagctggtacttggtttaaatctggaaatcctggagtctttggaattccattgacctgagctgggttactgtcctggtgtctgtctctagcacggttggaaggtaactgttcttatgaatggaaaggaggtgttggtgtcagatgtgtttatagttgcattatctcaacttgaacttcgtcttgttctcacctaacttgaggaagcaaggaaatttggaattcaaatattctaataatatttgttattaagtgaggacattcaaatcatacattcaaatattagtaatgtctgttacagcaaactaccagaaaaggacagcaagctacagatgacctggcaatgatgagcccatagggactgttagtgggaaggctgacagttcctggcacgagccccagggtgccttctagagcaggctaacatcttctcacacttgatcccgcccctgctctcccatgcacaaacggggtgtgcaaacagtctgtttagcttttcaaaaataaagaggaggccaggcgcggtggctcatgtctgtaattccagcactttgggaggcgcaggtgggtggatcacttgagctcaggagttcaagaccagcctggccaatgtggtgaaagcccatctctactaaaaatacaaaaattagctgggtgtggtggtgtgtgcctgtaattagctgggattacaggtgcgtgccagtactcgggaggctgaggcaggaaaatcacttgaacccaggaggcggagattccagtgagccgagatggcgccattgcactgcagcctgggcaagaaagcgagactctctcaaaaaaaagaaagaggagctgtccaggcgcagtggctcatacctgtaatcccagcactttgggaggctgaggtgggtggatcccttgagatcaggagttcgagactagcctggccaacatgatgaaaacccatctctaaaaatacaaaaattagctgggcgtggtggcatgtgcctgtaatcccagctactcaggaggctgaggcagcagaatctcttgaacgggggaggcggaggttgcagtgagccaagatcacaccagtgcactccagcctgggcgacagagcaagactccgtctcaaaaaataaataaataaaataaaataaaaataaagaggagattaaaattctcagcaaactagaaacagatggtaacttttttttttttttttttgagacggagtcttgttctgtcacccaggctggagtgtaatgacgaaaacatggctcactgcagcctccaactcctacacttaatcagtcctcccacttcagcctcccaagtagctgggaccacagccgtgtgccaccatgcctggctaatttttgtattttttgtagagatggagttttgccatgttgcccaggctgttctcacactcctgggctcaattgatcctcccacctcagcttcccaaagtgctgggattacaggcgtgagccaccttgcctgccctacaattaagtaaaatatcaaaatacagaaacatcatttgtttctgtctacaagcaacaagtaattagacaatgaaaagtcaaaacattgccatttgtaatagtaccccaccaaaacaataaaatacctagcaatctaatgaaaaatgtgcgaaaaatgtgcaagacttctacactgacaactgcaaaacactgttgggaaaagagcatatcttcaagaccttggagtaagcagagaggacacaaaaagtgatcatgtctttgaggctgaggtaggaggattgcttgagcccagcagttcaaggctgctgtgagctatgattgtgccactgcactcctactggacaacagagtgagaccctgtcgtaaaaaaaaaaaaaaaaaaaagtgactgtctgcaaacaaccccattaccccctccaccaccaagagcacttggctgtgaaaacccctttcctgaaggctttaagatattcccactgaaactaacatgtaaaacccagcctagaagccctgacttttatttccataaagaatgcacaagccaacagtaataactttggctacctaagaaaatcagttctggaatccccgaggggccctgtaagtgggatgttctgattctgcagcttttctgacaataggaatgtgaagcccttagaaaagccagccggagcaaatctgctttttttctcagcagggagagccagctcctgctgagatcagggtacattttctttctttttccttttctttttttctttttttttttttttttgagacagagtctcactctttcccccaggctggagtgcaatggcgtgatcttgactcactgcaacctccacctccccggttcaagcgattctcctgcttcagcctcccaagtagctgggatgacaggcacctgccaccactcccagctaatttttgtatttttaatagagatggggtttcaccatgttggccaggctggtctccaactcctgacctcaggtgatccgcccgcctcagcttcccaaagtgctgggattacaggcgtgagccaccaggccgggccttcttttttttttttttttttttttgagatggaatctccctctgttgcccaggctggagtgcaatggcgtgatctcggctcactacaacctccacctcccagcttcaacctcttctcctgccttagcctcccaagtagctgcgattacaggcatgtaccaccatgcctggcaaatttttgtatttttagtagagatggggtttcaccatgttggtcaggcttgtcttgaactcccgacctcaggtgatccgcctgcctcagcctcccaaagtgctgggattacaggcgtcagccaccatgcccggcctagggtgcatttctttggcatctctcacaaatgtgggtctcgttcatcccagctcttgggtcacagaggagctcctgaagcctccttccactcatttgtcataggcaccaacctcagagacgctcatgtttttcacgggacccggctctaactctgcctctatccagatgcacagggggccagatgcattccggagtgacccctgtttcctggtcttgaccttcttggcctcctaaacagcaaattacaggtataggtctggtggtctctaaggcaccatctcatgcctgtgtggatgctgagggtccagttcacagacctttctgcagagctggaaggccgtagctaccattcctgaagatgagggcctggcctccatctttagacctgtgggctccatccctttttctcttttctcttcccttctcttttttctcttcttttccttcttttcttttctttctcttttcttttcttcttttttttttttgagacaaggtctgactctattgcccaggctgtagtgcgcagtggcgcaatctcagctcactgcaacctctcactcctgggctcaagcgatcctcccacctcagcctcccaagtagctgggactacaggtacatgccaccatgccaggctaatttttgttatttattattattattattttttgacacggagtcttgctctgttgcccaggctggagtgcaatggtgcgatcttggctcactgcaacctctgcctcctgggttcaagcgattctcctgcctcagcctcccaagtagctgggactacaggcatgagccaccatgcccagctaatttttttgtatttttaatagagacagggtttcaccatgttggccaggctggtctcaaactcctgacaattgtgatctgcccacctcagcctcccagagtgctgggattacaggcatgagccaccgcacctggcctaatttttgtgttttttgtagagacagggttttaccatgttgcccaggctggtcttgaactagtgagctcaaacaatcctcccacctcggcctcccaaagtgctgggattataggcgtgagccacagcatctggcctccatctttttttctcaacactttggtgcaaggaacttgaaataaagaggtggcatgacatgacgagtgcctcaaacctgtgtagtgggtacatttttttccctccttctccatatgtatgtgtatttgatgaattaaaataaataatttgaacctgcagggcatgggtataatatctgcagatggactcacaaaacagaaggtgatatgtccacaatacaaaatgctctcaggtaagcttgagaggttcaaggccatctggtccccaaagcaccacaaaggccaccaaaagggccccaaggttgacaatgttcacactgatctcagaactgcatatatagctgagtggttctccatgactcctggcccacggaaggggccaaaatggtgtgagcataagcggtttctggcacattactctggggccatgaggttcggggtaaagtgagccgcagcttttacatgttagtttcagtgggaatgtctgaaagaagagccttcaggaaaggggttttcatagtcaagtgctcctggtggtagagtgggcaatggggttgtttgcagagagtcacttttttttttttttgagacaggatctcactctgttccccagcaggagtgcagtggcacaatcatagctcacagcagccttgaactgccgggctcaagtcatcctcctccctcagcctccccagtaactgggactacaagtgggcgccaccatgcccagctaatttttgaaattttttgtagagctggagtctcactttgttgcccaggttggtcttcaactcctagcctcaagtgatcctctcacctcagcctcccaaagtgctggaattacaagtgtgagtcaccgcactcccctgggagcaaattttagctttcctggtctcccttgtgcaggatgtgaaagctgtgagataggctgtaagccccaggaagggtagctgcattccagagtctgcaggatttgggaacaggcgtggacatggctggccagacacacgtgggcaggtgtgtcagagtctgccccatggggaaagggccaatttaacatctcatttgtgactggttgcggtggctcacgcctgtaatctcaccactttgagagaccgggctggcagaccacttgagctcaggagttcaagactagccttggcaacatggcgaaatcctgtctctacaaaaaatacaaaaactagcctggcgtggtggtgcatgcccatagtcccagctactttggaggccgaggtgagaggatggcttgagctcaggaggtggaggttgcagtgagccaagatcatgctactgtactccagtctgggtgacagagccagaccctgtctcaaaccaaccaaccaacccatctggtgtttaccaagtgcatccaggtatggtcactgatggattctatggcaaggtccagtggcccctggggcctgtagcaagagctaggaggacctctgaataacagatgggcttatctgagactgtaggagctacaactggcacactcaaaagccagccgctggccagcactttgggaggctgaggtgggaggatcactcttgagcccaggagttcaaaaccagcctaggcaacatggtaaggggccgtctccaccaaacaaacaaacgacaaaacttgccaccatcattcctagctccttttccagcctacaaaagcaagaggacactagcacccaggcacacttcctccaagccagctgtcctcttccctcttacaactctcctcctgtggctcgggtcctacagcccagcccctcatctcaggaacactcttgccctactctccgttactcaaccttctgaagaatcattgctccaccttcttccctttcacctaaaagctactggacaagtcccttagtagaaaggagatgtctacaggccagcacgatggctcacgcctgtaatccctgcactttgggaagctgagcagggcagatcacctgaggtcaggagttcgagaccagccttgccaacatgatgaaaccccgtctctactaaaaatacaaaaattagctgggcgtggtggcgggtgcctgtaatcccagacacccaggggctgaggcaggagaatcgcttgaacctggtaggaggaggttgcaatgggccgagattgcaccactgcactccagcctgggtgacagagtgagattccatctcaaaaattgataaacaaataaaataaagaaagatgtctatagttgtcaacctgcagtgaatcctcagtactactgggaaattctaccatgtttcttttgtccactcacctttgtgcttccagacctttcccactcccctcactctttgctgcagtctaaggtaaacctaccaccaagcattttatttatggatttatgtattttgagacagagtctcgctctgtcacccaggctggagtgcagtggtgcaatcatggctcactgcaactttgaactccctgggctcaagtgatcctctcactccagcttcctaagtagctgggactacaggtgtatgccaatgtgcctagttaatttttgtattttttgtagagacagggtttcactatgttgcccaggctgatctcaaactcctaggctcaagcaatgagcccaccttggccttccaaagtgttgggattactactgtgagccaccaggcccgatcccaccaagcattttagatcccctccttcaagccttttcagaaccttcacaagaagaaccagatcatctctctcctatatcctcagccactttcaaccagatcttcctctttgaccttaaaacatgtttaagtctcttctaccttaaaaaagcaaccaccaaggccaggtgcagtggctcacacctgtaatcccagcactttgggaggccgaggcggtggatcacttgaggccacgaattcaaggccagcctggccagcatggtgaaaccccgtctctactaaaaatacacaaattagctgggcatggtggtgcgtgcctgtaattccagctactcgggaggctgagacaggagaattgcttaaaactgggagggaggccgggcacagtgtctcacacctgcaatctcagcactttgggaggccgaggcgggcggatcacgaggccaggagatcgagaccatcctggctaacatggtgaaacaccgtctctactaaaaatacaaaaaaaaattagccgggcgtggtggcgggcgcctgtagttccagctactcaggaggctgaggcaggagaatggtgtgaacccgggaggcggagcttgcagtgagccgagattgcgcctttggactccagcctgggtgacagagtgagattccgtccaaaaaaaaaattcaaccaccaagaaaggtatcccctcaatctacactgacatctccagcacatacctctcttctaagctccagatcctcatccccaagtgccttattggtgcctcttctttgatgccatgttcacactggaactcgggccattcttcccatcctccaccctcccaaatatggtcctcttccggggcttcccaaaacaatgagtgccagcactacaatggctcatcccagagacccaggagacattcatgattcctacctcttcctcaccctccatatccatttcaccactgattttacatcaattttattccaaaatctttctcaaatttgactttcttttttttttccatccccattgccactaccatagtccatgaatggttttcaaagggaggttcatgtaccccatagtatgggaaggcaatccattgggatactgggagaaaatattagaacttctacatttctttcttttttttttttttttttgagatggagtctcgctctgtcacccaggctggagtgcagtggcgcaatctcggctcactgcaagctctgcctcccgggttcacacagttctcctgcctcagcctccagagtagctgggaatacaggcgtccaccaccacgcccggctaattttttgttgtatttttagtagagacggggtttcaccatgttagccaggatggtctcgatctcctgacctcatgatccgcccacctcggcctcccaaagtgttgggattacaggcgtgaaccactgcacccggcctcttttttttttttttttgagatagattctcgcttcatcgccaaggctggaatacagtggcgtaatctcagctcactgcaacctctgcctcccaggttcaagttgttctcctgcttcggccttccaagtagctgggattataggcctccaccaccacgcctggctaactttttgtatttttagtacagatgggatttcaccatgttagccaggatggtctcgatctcctgacctcatgatccgcccacctcggcctcccaaagtgttgggattacaggcgtgaaccactgcacccggcctcttttttttttttttttgagatagattctcgcttcatcgccaaggctggaatacagtggcgtaatctcagctcactgcaacctctgcctcccaggttcaagttgttctcctgcttcgaccttccaagtagctgggattataggcctccaccaccacgcctggctaactttttgtatttttagtacagatgggatttcaccatgttggccaggctggtctggagctcctgacctcaggtgatcctcctgcctcagcctcccatagtgctgggattacaggcatgagccaccatgcctggcccgtctctatgtttttgactactctaggtaccttatgtaagtggaatcataggatatttgtctttgtgactggtttcttttggcataatatcttcaaagctcatctatttgcatcgtagctgggattataggcatgcgccaccacgcctggctgattttgtatttttagtagagacggggtttcatcatgttggtcaggctggtctcgaactcctgacctcaggtgatccacgcgccttggcctcccaaagtgctgggattacaggcgtaagccacggcgcccggcctccttcaacgctgagtaatattctattgttatgtttataccacattttgtgaacccattcacccgtggatggacattgggttgcttccaccttctgactaatatgaacatgggtgtacacatttatatccactcttgcctcccctccgtagtccttccttctccacactgcatctagagtaacccctttacactctcaagtatggacaaatcacctcttgcttaaaactcattagttttgcaacactgtcaagtaagacctaacttctcaccactctgatttattattggaacacaaaactgggccatgctccgtggctcaagcactttgggaggccgaggtgggcggaacacctgaggtcaggagtttgagaccagcgtggccaacatggggaaatcccgtctctactaataacacaaaaattagccgggcgtggtggcgcacgcttgtaatcgcagctatccgggaggctgaggcaggagaatcacttgaacccgggaggtggaggttgcagcgagccaagatcacgtcactgcactccagcctgggcgatagagcaagactccgtctcaaacaaacaaaacccacagaactggaagacccttgctgctgcttctgcgtaatgtgttctcctcccttctcgtttttttttttttttttctcccttctaccccttaggacctcagctcctgctctttccctgggggaattccggatcactctcctttactaggtcagggtactctctccctccctcttactctttcccctcctaccacttgtcaccattggtactatattatcacccggatatgtgacaatggtattgtgtatttaccactaaggaataaacttatgagggagagagcactacccgttcctgcagtgcccgtcggggcctggcatctaggaaacactccatacgccagtaatcgatttcagtcaatttcagtaataaatccaggaggacgcagcccgacccctcccgcccgggggccaagccatggtgggggatctgggtggacctccggctctggccgccagtcctcaacctccgccccggccgtcccgcttgggggcccagggtcccaggagaggaggctccggggcgccccctcccctctaatgcgagaggagagtccgctctaggcgcgggatccgcaacctccccgcgtccgcccgaggcgggggcggggccggaccggagacgtaacttccggtgtacacagccggtccaaggcggtgcgctgggggccggggcgcgtcgcaggtgaggagcgggcgcggcgggcgcaggcgggggctggcgggcggggtcgggcggtgggcggtgggcagcggggccgcgggccgcagccagggcagacggcgagacgggcccgcggggcgccgctccgctcggggccgcagggcgcggggccgtgggctcccgccccttgcccgcccgctgtggaggacgccgggctttgcgggcgctggccggccgacggaagcccggaggggcctcctggcgcgaacccgggacctgggggcgcgtcggagactcggcggccgcggcaccgcaggggcgggtcggcgcccgtcaggcggggaaaggggacgctccctcggttcgccggggcccgggaggtcgcgctggcgccaggacccgctcccggaagcccgcggagggagggcggcctgctggcggcaggggtccgctggggctagccggggaggcggccctcacgccatcccggggctgccgggcgggctgcgcgcaccttcccggcggcgccaggctgccgaggaacgcgcttttccggccctgcggagccagctggcgcattgggcccgaggggagggtccgcggggaccgggagggccggggctgagcgtggaggacccgagcccgagggacgagcgcagagtcaggggtgtgtctttctgcgccgcgcggtgcgaggaaagaagcgtgcctggttggcatgataagaattttgtttagactttttagaaattttccagagactcagctttgggggcctccagtttgaaaataccttgttctggtccctcatccccattataaaagcagttaattctcctttcctggcaaaacactcaagacgacacaaaaagtcttaaggtagaaaatgacagtcatctgccagtctaccattcagtgacaaccactgctaacattttggtgataatcaataaatacagataggtattgttatttttatggactttacagtatgtgatttaaccaccgatgagcattgagatagtttccaatttgtcacaagataaacaattctgccggaaggatttgtttgatatggtcttttttttttttttttaataagagactgttgcccaggctggtctcaaaacttctggcctcaagcgaccctcacgccttcgccttccaaagtgttgggattacaagtgtgagatattacacctggtctgattgttatcttagaataaatttacaaatggggtcaaaggtaactttatttgtttttttttgagacagtctccctctgtcacccaggctggagtgcagtggcgggatctagattaactgcaaccttagcctcccgggttcgagcgattctcctgctttagtctcccgagtagctgagattacaggcacccaccacgcccggctaatttttgtatttttagtagagacagggtttcgcccagttgaccaggttggtctcgaactcctgacctcaggtgatccgcctggctcggcgttccaaagtgctgggattataggcgtgagccaccgtgtccggccgtaacgttcaatttttaagaatacatagtatttgttttcctttgacatatttggacaatttttctgtctctttgtcataaaaaaaaattccagcctggcgcgatggctcatgcctgtaatcccagcactttgggaggccgaggcgggcggatcacttgaggtcaggagttctagaccagcctggccaacgtggtgaaacccggattcaactaaaaaaatacaaaaaaacacattagccaagcatggtggcgcgctcctgtagtcccagctacttgggaggctgaggcaggagaatcgcttgagcccaggaggcgaaggttgcagtgagccgaggtcgtgccactgcgctccagcctgggcaacagagtgagactccatctcaaaaaaaaaaaaaaagaaattcatgtttgcgtctcatcgtttcatggttttatttttttgcctttagtctacctaaaattcattcttggtttaaaatatgaaatattttgtaaatggctagtcagttccagatttattgaataatatgtaagctttatcattttatcatattttagactaaaagttctaagtgtatgtttgtaagggctacttacaaagttcatatttacattttgtgtgtgcttagatgttttcaagtgtctttaaaaatcacagtattttcttttcacagtatcttcacaatattttgttttaaaaagaaatcattttccaatacaagtacagggaatatttcatgtttgagattttttttttctttttaaagcaaaaagtttagtttattgccgtttcatttgctttcttgctgacaagataacaaactccatatgaagagttcaggtttgttgtggcaacttttcagtgtggcatttgagattctaatcttcctctatttttgcacacaaatacgtaggttggcattggagaccaagatagaaaagttctcagattcccttggcaagcctagatttttcaatctaaaattatctccagatgtttggaagaccatgttttaagcatccttttttttttttttaagcaaattgcacatgattctgtgaaaattttagtaaatgtttgttctgttgaaaacctatagcctaatacatcaggatccatgtgtcaagtgggtcttccaagtctataggaaataattgtttctgaaagctagcaggctgggatatcacatgggttgggtgtccactctctttttttttgagtcggagtctccctctgtccccgaggctggagtgcagtggcgcaatcttggcttactgcaacctccacctcccaggttcaagcaattcttctgcctcagcctccctaggagctgggatcacagttgtgagccaccacccctggctaatcactcttttttcctcctgtaactttgtccttagtgaaaaatgatgatcttcctaggtaggcaaaaaaatgttggtttagataaggaattgatttgttttggagttattgaaaagcaggttgccgttttctctgaagtgtaagttcacagagagcctgaatgttgtgtttggattaaggaaaaacagcaacaggttgtgcttgtgcttcaaatgtctttaactctactgaaactgccctcttgagggtcccctaactgatgcatgcagtggccattgcttaattattttccttgactttgatctcaggtatttggcatggtgagctattctttcttgctctcgtgaatctcccattgattggccttcttttttctttttcttttttttcttttttttttttttgagacagagtcttgctctgttgcccagactggagtgcagtggctcggtctcagctcactgcaacctctggctccagggttcaaacgagtctcctgcctcagcctcccgagtagctgggattacaggtctgcgccaccacccccagcaaatttttgtatttttaatagagatggggtttcaccatgttggccaggctggtcttgaactcctgacctcaaaagtgctgggattacaggcgtgagacaccacgcttggccttgattggccttcttgacttggaactagtgtggtcatttcctgaaatctgtgactgcactttctcatttgtctttactgcttctcttcatacatctaccttggggcattttctgaagcctagttttgtacctcttacccccgctccaaaacatattccttcccacttatccagtatatgagtcctgggtagagaaccacctcatttccttacctctgccaccacttagtgacccccgactcagagttttctgcaggtcaattctttttctcctgttcagtaacccctggacatgttcctgaggccatgctttctccaggtgaagaaaatatcacttctggccgggcgcagtggctcacgcctgtaatcccagcactttgggaggccgaggtgagcggatcacgaggtcaggagaccgagaccatcttggctaacatggtgaaaccccatctctactaaaaaaaaaatattaaaaaattagccggacatggcgatgggcgcctgtagtcccagctactcaggaggctgaggtaggagaatggtgtgaacctgggaggcggagcttgcagtgagctgagatcgtgccactgcactccagcctgggcgacagagtaagactccgtctcaaaaaaaaaaagaaaagaaaatatcacttctttgcgaggacaaggtgagaggattacatgctctcaggagttggagaccagcctgggcaacatagtgagacctctgtctcttaaaaaaatgaattttaggtctggcacaggggctcatgcctgtgatcccagaagtttgggaggccaaggtgggaggattgcttgagatcagcctaggcaacatagtgagactccaaaattatctaggtgtggtggtccatgcctataattccagctacttgggaggctgaggccggaggattgcttgagcctaggaggttaaggattcagtgaactgtgattgtgccactgcactccagcccaagcaacagagcgagaccctgtctcaaaataaataagtaaataaataaataaataaatatcacttatcaaggtgtcctgtccttcctgactcttaaggttcttaccagccggtgaatcacatcttccttcttgatatggattgtatttgccatttgctttctatccctacacctcgatttagactttgtaccttttcttaagggatttcaggcttaacgtggtcctactctggatgtgaaagaggagacccagtgaatttactcaagaattgagttagctcacatttatggagtacctacagtacagcccagttactttactggaagatcagaatacagagctggacagcacatcctgggaagaatgccaaataagcaattgtcataaagtattataagtgcctagaaggggagtcaccaagtaacctctcccaggtttcagagatcttgcgtgtcttatttactgctttgatctccagggcctagaacacagtgcgtggaaatgatgaagttttttttgtttgtttgtttgtttgttttgtatttcattcagtttaatgaggggacatgaggagccaggggcagaatgatatggttaggctgtgtcctcacccaaatctcatcttgaattgtagttcccataatccccacatgtggtgggaaggacctaatgggaggtaatttaatcatatgagcagtttcccccatgctatgcttgtgatagtgagcaacttctcacaagatctgatggctttataaggggcttcccccttcacttgggtctcattcttcttgctgctgccatgtgaagaaggacgtgtttgcttccccttctgccatgaatatgttttctgaggcctcccagccctggggaactgtgaatcaattaagcctctttcctttataaattacctagtcttgggcatttccccatagcagggtgagaacagactaataaaccttattttaagaaattgccacagccaccccaacctttagcacccacactctgatcaattagcagccatcaacatcacggcaagaccctctgccaacaaaaagtttaccacttgctgaagatgcagatgatcattagcattttttagtaatgaagtatttttaaattaaggtatgtgcattgtttttgtgacaatgcgattgcatacttaacagactacaatatagtgtaaatataacttttatatgtacaggaaaataaaaaacatcatgtgacttgcttcattgcgatattcactttcttgaaatgatctggaatgacacctgcaatatctccaagataagcctataatatcttttcctgataattttggctatatacttcttgatcaccttttctatgacaaggatttggtaatatcatttttttatttttattttattattatactttaagttttagggtacatgtgcacaatgtgcaggttagttacatatgtatacatgtgccatgctggtgtgctgcacccactaactcgtcgtttagcattaatgaagtatttgttgaaggaatgaatgatcatctgagaatgaaatcagaaaaaatgtcatacacattagctatctatagaaaagatataagtcaaaagatatttcgtaaatgtagtttgaagaatctcagggaaaactttaaattcaaccaaactgacccagctataaccccaggaaggcatgcatggaatgtgtttgtagctggaaagcttaaacttaattttgtatcctcagaagaaatacttgtgtttctgggagaggattgggacagtgtctggaaattggggtggcgggtccaagagaggaattacgtggtgtgtgtgtagcactctctgggggcctgaccagaggagcagtgcagcgttccctccacaaagccatctgcactaacacacagatgggcgtgtccctgttgttgcctctggctgcaagggtctctcccttgcttagcgtctgtcctcccagtaccatctgagtagaagatagctgcacgtggagatttcttggtaaggagagaatgtgagtggttgagggctctgcatctaagctgcttggatcagatcctggtcttgggatgctggctaatctttcagttttctgatttgtagaatggggataatagtagcacctttctcttagtgttgcagtgagggctctgagcgtgctacccggcacctgtgataagtattcaatgacagtattagctctcgttggtattcataaagtagtaactggcctctggttcatacatcagttttctttgagcttagatagcctaaataattaatccccatggaactgcttgcttctgggtgcattgaataagctgataaacagacactgggaagtaatgacagataagctcttcctacactgctcatccagggaatccagcctgcagttctcaggggagacttctggagaaggctgttcttgagctgagtactgtgggaaaaagtaagtccagtgccacagcaagaggggaggactcttgggcaggggcatgacacgtccaaaggtgtggaggtgagagcaagcatgaggtatttgagctgcaggagattgagggtagagtctggacaggtatgaataaggagtagagggaaatgacattggaaagtgggagcagtccttgaaataactaataacaatgtctaactgggcactaacagcacttcaggtcctgtgctgagtccttcgactcactgcgctaaccaggtttgatgctgagagctttgtctacattgcattgtttaatcctcacaacaaccctttgatgtaggtacttacctctggtatgtgtggcatcatgtcacatgtcacctggtaggtctccctgcctttttttttgaaatggaatcttgctctgtcaccctggctggaaggcagtggcaggatctcgacttactgcaacctctgcctccctgggttcaagcgattcttctgcctcagcctcccgagtagctaggactacaggtgagtgccaccatgcctggctaatttttgtatttgtaatagaggcggggtttcaccatattggccaggctggtcttgaactccttaccttgtgatccgcccaccttggtctcccaaagtgctgggattacaggagtgagccaccatgcccagctgctgcttttttttttttttttttttttttttttgaggcggagtctctctctcacccaggctggaatgcagtagtgcgatctcagctcattgcaacctccacctcctgggtcgaagcaattctcctgccttggcctcccaagtagctgggattacaggcatgcgtcaccacgcccagctaatttttgtatttttagtagagatggggtttcaccatattggctaggctggtctggaactcctgacctcaggtgatccgcctgccttggcctcccaaggtgctgggattgtaggcgtgagtcacctcgcctggcctctgcttcttgattcagcctgcacatggctgccaagataactcccagtgtcttatatatgtttaaaagctttttgtgatcctgtttcctgatgaagtccaagcacactaagatcctctgacttcatgaaaaaccacgaagttaaaatgtaaaaatatttatatcttagaatttaataaaaacaggacaggtgcagatgtggatcaagctcagagaaatcagtgaaagaagcaaggtacagaacaatgtatgtttgcccatttgtgtttttctaattttaaaaaatttctccacttttgaagtaatatgagctcatttgtttaaaaaaatatatataggccaggcatggtggctcacgcctgtaatcccagcactttgagaggctgaggcgggcggatcacctgaggtccagagtttgagaccagcctgacaacatggtgaaaccccacctctactaaaaatacaaaaattaactgggcatggtggcgggtgcctgtaatcccagctgtccaggaggctgcagcaggagaattgcttgaacctgggaggtggaggttgcagtgagccaagatcgtgccactgcactccagcctgggtgacagagcaagattccatctcaaaaaataaataaataaaaataaaataaataatgtctccctctctcgatagagagatagatagatagatagatagatagatagatagatatacatgaaataggtttataagtgcagaaataatttatggaatgatagaaaagaaacagtggttgtttttgggatgagaccccagaaaaccaggctgttaggctgagttagctttttctttgcataccattttgtatggtgtgaatttttttccctgtgtatatgtattttcttttttttctttttttttttttgagacagagtcttgctctgttgcctaggctggagtgaagtggtgcaatcttggctcactgcaacctccgcctcctgggttcaagcgattctcctgcctcagcctcctgagtagctgggattacaggtgcccgccactacgtctggctaatttttgtatttttaatagagacagggtttcaccatgttggccatgttggccaggttggtctcgaactcctgacctcaagtgatccatccacctcggcctcccaaagtgctgggattacaggcgcgagtcaccgcacccggtctatgttttcattttaacaataacttttaaaataaatgtctatgatggacatggctgttgtgtagagtgaatgtagcatggaggttaagagtgaggactgtgcaaggcggcttgggttcaaggcctgcccctgccttgacctcagtttacctcctctgaaaatggggaggtagtaatacctgcctcctggggttgtagtgaggcattactgagttaatatttgtaaagtccttggaacagttcccaggaggtatgtgtttgtcgtcgtctctgttgctctgtccctgtgctatgcatgaccgtaagtgtaaagatgtgtccagcctctgtctctgatgctcccagttcatttggaaagggagagcatgcagctaatgacagagacagcagaggctgcaggagtcagaaaggctccttgggaactgaggtggcccaagatggtttcatcaaaatgatggttgttaaatatgggtaatttctagagggaaaataacacaaagggactttttccatgttgtgtgtcccagccagcctgaggcaggcagaggagtcagaaacaggacaagagctttgaggaggcctgaaatttggacgtgtcatgtgatgacatgtctttttttttttggagggggggacggagtcttgctctgttgcccaggctagaatgcagtggcatgatctcagctcactgcaagctctgcctccccggttcacgccattctcctgcctcagcctcctgagtagctgggactacaggtgcccgccaccatgcctggctaattttttgtatttttagtagagacggggtttcactgtgttagccaggatggtcttgatctcctgaccttgtgatccgcccacctcggcctcccaaagtgctgggattataggtgtgagccaccacgcccggctggcatgtcattgttatatggcagagtttttcttggcatatatgagacaatgatatgatttgtaaatggtgacatctttgactcagtgaagtgtggttgctctgccttgatgtttggaatggctatgaggtgttctgtgtgacgtatttaacaatcctcgtaatgcagggcacgtgggaataaccagtgttgccagtgagtgttcttgacgcaggcctctacattaaccgtgagtctgttctaggattcgtgcctagatagaatattgcttttctttcttttttttaagtcattttgattatgttccttgtgtctgggccactgtcagttaagtgtgttttcaaattggcagtggcaaagaatcataatgggaagatttttgaaagtggaattagagcaagatattacctgaaaaaaaatctgattttcttactaaaaatgattttgggattaagtactagtgagatgctaattatggccaggaaacctggaaataactcgcatcttccctcaccccacccccggtccccgaggtggatatatgttcatgggaacagagtttggggaaagctggcttggctcccagacttgggtgccgcaggctctggtgacctaggcaggaagaggcggaagtggttcctctcaccagccacaaggacctgtgctgctcctgggtgtcaaggtgggagagaatgcgctacatccttgtgcttgagtcactttgtaatgtactttgtaattccaggtgatgcccctcctcaactgtgtcccttctgttcctgcctttggcttggggttgaaagaggagggagtggtgggcacggaaatgggaggagccatgacctctttcccctccagcgcatagggcattacttcttttagtttgttgcctggacttgggagttgggcccagagctgcaggaaggtaagttttatttctgaaagttgttttaacttacagattttgggggttcgagggagtttgttttcgactagtagaagacaagaattaagaattgcagtggaagatgaaatgctatcttcttactaatccacgccctctttcagagcagtagctttcatttacggagactgagggtatggcagaggctgtgctttatggatttaatcctcagcagtactgaggcacaagagttaggcgacttgctcaaagttagtaagtgccatttattcagctgatatttactaagagcaggaattcacatctagatcagtctgattcccatacccgtaccagtaactactgcattttggaagtgcgtcgtttccatgaagtttctttgtattggagcatctacctgaaaggcaagggcctgagcattttctccttttcccttattaacggtaagctccttgagagcaagcattatgtctgtctcttcaccactgcatcctgggttcctggagcagtgctatgcacttaggagaaccttagtgaatgtttgagtatgtgaaggctcatggcgcagataagtggcagagccagaagccagcctggaggtgaaccactgcgggcctgctctctggggctgtcttccctgcctagcgagtggatggtgaggaatcacctagaattttctcatttcttaatgtttgacctgatgaaatattgggaagaatgagcttcctggctgtgactctgattttctgttgttttttttgagacaggagtctcgctttgtcacccaggctgaagtgcagtggcgcaatctcggctcactgcaacctctatctccggggttcaagcgattcccctgcctcagcctcctgagtagctgggactgtaggcgcatgccaccatgcccagctaatgtttgtatttttagtagagatggggtttcaccatgttggccaggatggtcttgatctcttcacctcggcctcccaaagtgctggaattacaggtgtgagccattgcatcaggcaactttctggtctttttgagggatgggaaggtttgctgggtatgcaaaattggagtcagtgttctcagcttggaagagatgttataatttattgatagaattttttatggatgccttaaattctcagaaatgattttgaatcttaagtttatctaaaatttatataatccttctccatagtgagaaaaaaatttctaaattatagttcgatttacctatttatatataagcttctggataaatacttgtttttttttcctccatttgaggttaattttggataggttccatagtgcaaagttgttaagagtggcagtatagaatttttaagttttcttgggccagacatggtagtttatgcttgtaatcccagcactttgaagggccgaggcgggaggatcgcttgaggccaggagttcgagaccaacctgaacatcacagcgaaaccccatcttctgcagaaaaatttaaaaattacccaggcatggtggtgtgtgcctgtagttccagctacttgggaggctgaggtgggaagttgcctgagcccgggagatcaaggctgcagtgagccgcgatcacacaactgcagtactctagccttggcaacagagcaagagactgtaaggtctcactgcagcctcaatctccctggctgaaaccatcctcctacctcagcctcccaagtagctgggactacagatatatgccagcacactgggctaatttttttttgtttactttttagtagagtcgaagtcttgctatgttgcccaggctggtcttgagctcctgagctcaagcagtcctcctaccttggcctcccaaagtgctgggattacaggtatgagccaccgtgcccagccaagaccctgtctttaaaaaaataagtaaaaacaaaaacaaaaaatagaattttaagtcttcttaaataactttctaatggacacaattagttttcagtaatccaaccttttttttagaagttttgaaaacttttttttggatacctgggcttttgcacattgtaccacactgtaacaaaaataaaccgcaggtttctaactggtgtagactgttgatttttttttttaacaaattaggtttgaataaattatataattgctttgtggtttttttgtttttttttttttgatggagtctcgctctgttgcccaggctggagtgcagtggggtaatcttggctcactgcaacccctgcctcccaggttcaagcaattctcctgcctcagcctcctgagtagctgggattacaggcacctgccaccatacctggctaatttttgtatttttagtagagacggggtttcaccatgttggccaggctggtctcgaactcttgacctcgtgatccacccgccttggcctcccaaagtgctgggattagaggcgtgaaccactgcacgtggtgctttgtgtttttttttttttaaatctacttagaaataaattattttcaccccctgatttacacttgaatttccactagcaacacaatttgttgtcacaaatgttttcatagtacttgggcacatttgatgcagaaatttttaatggtccaagactattttagttgatagatgaaaccttccttttacctgaacaaactttttcggaagtttaggagccagctttgttcatcctttggtgataggtggtggtttgtatgtgtttgtagacaaaactttccttggcggggatttgccccttttttcgttgtttcttcttcctttgaagatctctgtttaacaaagattttttttttggctcacagtgttcctgtaatagaattccttcaagagttctaatactagttttgttttgttttgatggcagcaggttttgagagtgagcttttgacttcataagaagactaaaacaacagtcttagagtacagttaagtccatttgttaccagaaaatcagacagacagctaggtctgtcctcatcaggaccaagtaatactggatttttttttttcattaaatgttcactatttttctttgtatgaaattgaggccaggtatagtgactcacacctgtaatcccagcactttgggaggtcgaggtgggagggttgcttgagtccaggagtttgagactggcctgggcaacacagtgagactccgtctcttaaaagaagaaagaaaaaagaaattgaatatgtggtgattactacccgtttcatttacttttttacttattaacgtagtgactgtttaaaaaaagttacgcattgatcttcctgttccttccccaccaaaaataaaagcaaaaacaacaagccacccctcaaatgaaacaaaattaagcctgttctttatctatattactacttagcacatttgacctatttttttaaaacctctgttattttgaaagtaaattttggctctgttgaccttgcggttagaaaagttgttcttctgcttaaatgaaatgatcagttgtttgtagattaccaaatataaaagctcttcagaaccgctaatgataagttgctttggcttcatagaggaacgccatggtttgtggtggtaaattgttacagagcaaatgtcagtaccagaggcggtcatggatcaccacgtggaagcaggttgttcccacatgagattggtagcgagccggtgctgcatctgtctcctttcccactgcatcctgggtgcctggagcctcacagggttgacccgtgttgggggtggggatggttgtagaagcctctttatttttacttgtgatagattctggcactgattagaatgtttattcagtagtttttttcctatccgcctgagttttcatagctcagtataggataacatgggcttcggattttgtcaaccaatcaattatatagtagctcttttgttttgtttttaaaatttatttctatttatgtatttatttatttattttgagagaggcccttgctgtgttacccaggctggagtgcagtggcatgatcatagctcactgcaaccatgaacacctgggcccaagtgatcctcctgccttggccgtctgaagtgttaggattacagtgtgagccaccagacctgacctttgttttgttttagtagctacctcttgactagaaaaatagtttaatcttggcctccttaaaaccttttcattgatattttttactctgctagaacagttcagtttttgcatgtcttcaagtgaacatgctttagtattaattccatggaagccatttctgtagaataggctagtgtccagttttgtccagttttccttttggagcagtgtctcaggcacagaaatagtctgggcttggtggaccccaccccaaagtgtcacttcttttcctctggccttgctctccatgcccgcctttctcttctgatgttttaatgataccctccctgctcggtgatttgtgttcaggaagctaggcagtgattacttttgtttctgctttgtgaacttcctcccccacttcctatttttaccgcagttgcacaggaaatgaggcggctcctggctggctgctgctaagcagtgattttaggtggcagaggacaaggcctcagggcctgagccatttaaggcattttccaccttaatcttttcactaccttcttcctctaggagtcataggaacatgattttgtgattgggttgaggtgacatcatgtcctcagccttgtgggtggagacaggggttgctgtttagttggaggacagcacttttgtgaaggaagtgagggcttttttcagcagtaacaatgtgggtggaatgtcgtggccctgtggcctctgcagcttgagggaaggttaagttgaagggacaggccctgttgcaggtaaggatagggaggtggattctggttactctctagagggccttgactggcagcttgaagtgagctgaggagcctagtctgctctctcagatctttgaggggggcctcagcctctatggcaccctccttcctctgaacccatggcatttgttttctaaacgacttatttagcatttatcagtctcttttttgatgatgcctcttcttagcttatggacccgttatagcttaatttatggagaaagtttgtatcatctccccagaaagaagtaacttgttatacattagttaacttgaatatggaaggtgctcaaagcattagtttatcggagattcttaagagctgcactgttgacattttggggtagataattctttgtaggggctgtcttgtgcattatgggatgttcagcagcacttctggcctctacccactggatgctacccactagcacttgcccagggtgacaaccaaaacatctctagacattgccagatgttggtagggcagagaaggacacaaaattatacttttccccacttgttgagaaccactgtgttaaagaattgaattactaattactaacttataaaatggaataaagtagaatgtttggttccctgggattaaagccatttgttagtttctattttcatatctgacattctcataattcttagtttgctacttagagtatgctgtgctctatcagcttcagctagtgttcaggtataccttctgtgcactttcttttttttttttttttttttttagatgaagtctcactctgttgcccaggctagagtgctgtggcgtgatcttggctcactgcaacctctgtctcccgggttcaagcgattctcctgtctcagcctccctagtagctgggactacaggtgtgtgccaccacacccaactaactttttgtatttttagtagagacagggtttcaccatgttggccaggctggtctcgatctcctgacctcgtcatccacccgcctcggccttccagagtgctgggattacaggtgtgagccaccacgcccggccccttctgtgcactttcattgaaagaactaggagctgggcgcggtggctcatgtctgtagtaccagcattttgggagccgaggcagaaggattgcttgagcccaggagtttgagaccagcctgggcaatgtagagagaccccatctctacaaaaaatcaaaaaataaaaattagctgagctacttaggaggctgaggtgggaggttcacttgagggaggtcaaagctgcagtgagctatgatcgtgccactgtgctctagcctggggcatggagcaagtctcaaaaacaaaaacaaaaacaaaaacaaaaaaactagggcctgagcctttggcaggctggcttcttgtcctcatagaaggcattctgtcagcttctgtgccttgatattgcttgctctggaagtcaatttccttggaagctgagtagtgcaagggtaaggaggaaatgagaaacatttaggatataataataataggtaacatttatggagcagttgctgtagaagaggcactgtggtgaacaggattgacaggattgaaaggacaggctagacaacaggacggggaccatctggaataacaccttaagtttgggttaaaagttggttgtgcctttgaccaagcaaggcagtaaatatagcaggaggagtgggaaatagaaaggtgacagggtaaaactttttttgaaacatagtcttgctctgttgcccaggctggagtgcagtgatgcaatcttggctcactgcaacatctgcctcctgggttcaagtgattcccagatagctgggatcacaggcgcccaccaccatgcccggctaatttttgtatttttagtagagacagggttttgccatgttggtcaggctggtctcaaactcctgacctcaggtaatccacccaccttggcctcccaaagtgctgggattacaggcgtgagctaccgtgccctggccatgaaagggtaaaacttgaagaccctgcagagatgtctcctgggtctggtccttggagagggaggtcttgactggagagttgaatttgggaatcatcagcagtgatacggagtatgatctcctagagagaggtcacttttcattgctccagctcagcttctcatcagttccaagaagctggaagccttaaccatcttctaggagtggtaagcagagtgccatggtctggatatttgacagaggtgggatggtgcaagaatggagagctcaacctgtggcagcagattgccatgtcccagacctagctgtgtggtgaccactaccttagccatgtggtgagaacatgaagaactcacttcatcttattagatgcctcacctaccttatggggtcattgtgataaccttgtaatttgataacacggccaggtgtgatggcttacgcctgtaatcccagcactttgggaggccaaggaggttggatcacttgaggtcaggagttcgagaccagtctggctaacatggtgaaaactgtctcgactaaaaacacaaaaattagccaggtgtgtgacgcacacctgtactcccagctacttgggaggctgaggctggtcaatcacttgaacccaggagatggagattgcagtgagccgagattgtgccactgtactccagcctgggcttaacagagcaagatcctgtcttgaaaataaataaataaatatgataacatgtgaagtgcatagcacagtgcctggctcttacccacagttaatgtcagctgtttcaagatatttgatatctaaagctccaagtataatgcttggcacgtcatagacacttagtgactggtccatttctttggggagtacttatgtggacgtggcatgtcttcactagcttatttatttattttaagcagaaccttatttctagcatctaactactgcctccgtggttggcaagggtgacttcatgaatgttgtaaaggaataccattaaataagtactgaggacaaactaataattcaacaaatatttgttaaatgtttacatcatgcttagcacccttggatgttttgaatgagctcaggggtcctgggggttggaggtgacagggaaacacagagcaaaccggcagttgtgatctagcatgttatgcttcagtagagttaatgttaaggtggggctaaaaacagggtgttacggcagcagaggaacccctcgctcagtctgtcaaagtggtttctcagaagaagtgatgcctaagttagacatccaagaggaatgagagtgagccaagagagctttccagacagtagaaatgaaatgtgtggccaggtggcgagaaggaagatggcacatgtaggaagtgggtggtgttggggcggtgtaagaaaattgggaagggtaatggagagccatagtggattttaagcgcagagtggtgtgatcacattgattctagagtagtcacacagcatccagaggggagtagcccaggcatttggaagatcactcaggaggcgcctccataattcaggcaggaggtaaaaacagtagctttggtacggcagtgaagatagaaggaaaaggacttgagagatactaagaaggcaggaaggggccgggcatggtggctcatacctgtaatcccagcattttgggaggccgcggcgggtggatcacctgaggttgggagttcgagatcagcctgaccaatatggagaaaccccgtctgtactaaaaatacaaaattagccgggtgttgtggtgtatgcctgtaatcccagctactcaggaggctgaggcaggagaatcgcttgaacccaggaggcggaggttgcagtgagcttagatcgcaccattgcactccagtctgggcaactagagcgaaactccgtctcaagaaggcaggaaggataagactgtgattaattggatgtgaaggagagtgaagagtagaggataactcccaggtttctgccttgttcaagtaggcagatggtgatgtcatttgccaagactgggaaggcatattgaaagacttggaagatttggttttggacttttgattttgggacctgtccactaggcagttgaatatttgggttctggagcacaggacaaagatctgggctagagggatggatttgggaatcttcccagaaggaatatgttgctcttagaaacagagagggcatagcacttaaggtctatcagaggaggagtagctcaaaggggcaactaagaatggccagagaggtatgaggagagccagcactaagcgtcttttcgtgttagcagcttacagagttgcttcactttgtaatgtggtaacagatagagggagctaaaaaagtagagttctaaggaacgtccgagcaaagcactgaattttccaggcattttctcttgcctggatagatattttaaatttatgaatgttgagaataaaattcttcaaagcatttttctagagtgcatttctaaatacggtttgagtcagtctgaactgactaaaaacatggaaatggttgggctttgaacttcatagacaataacttcactaatctgcctaaagaatttcctgtagtgtctccacattatcaagggtagatatttggatttgcatttttgtggattggagaggacagaacattttctgtgtttttttttttttcctcagaagagggaattgtttaggaatgattcatctttatattttttgtaacagctttattgaaatataattcacataccatacagtttatccatttaaagtatataaattggtggtttttagtatgttcatagttatgcaaccatcatcaattttagaatattttcatcactctgcaaataaaccatatacccattagcagtcatcccttatttcccccattccacacccccacccccagccttaggcaaccattaattgactttttgtttcaatggatttacgtaattggtacagttcatattaagggaactttgggtctggtttctttcacttagcataatgttttcaaggttcatccatgtatcagtactttattccttttcatggctgaataatattccattgtacagttatactacattttgtttgtccatttgtcaattgatagacatttgagttgtttccagtttttggtattatgataatactgctccaaacgttcatctgcatgttggtttgtagacatgtttttcatttctcttggatatatatacctaggagtaaaatttcttggttgtgtggtaattttatgtttaaccatttgaggaactgccactgtgttttccaacatgtctgtaccattttgtattaccctgagcagtatatgaggattccaaattctctaacattttgtcaacacttgttattgtctgtttgattatagtaatcctagtggttgcgaagaggtatctcattgtgattttgatttgcatttccctgatagttagtgatgttgactgtcttttcatatgcttattggcatatcatctttggagggttcatctatatttgtgttttgtttgtttttttttctttagagatggagtcttgctctgtcttccagactggtgtgcagtggtgccatcttggctcactgcagcctatgtttcctaggttcaagcagttctcctgcctcagcttcctgagtagctgggattacaggtgtgcgccaccacgcccagctaattttttatttttggtagagatggggtttcgccatgttgaccaggctggtctcatgctcctgacctcaggtgatctgcctgcctcggcctcccaaagtgctgggattacaggggtgagcacctgtgcccagcccatccatatttgatcatcagttttggcaaggtaaattaagttgcaaaacctgaaactttaaaggaacaaacataacacatttgattgtagaaatgagggaaaaagagtgtgtgtgggtatgtgtgtttatgtacatatgtgtatatgtacagtggaagatgccataaacagatttgtaaaagttaaaggacaggctccccagagaaatagccagtgtgctccatccacatcaagcctgagtgtgagagagttctggataatcctgttacctggctgtgactttggaagtggagaccatgatctctgccttctccctcatatcatctgtcttaaggtcacagataccgcagccactgccaggtttccacaagccagtcacctttcaggtggagaagtagcttgctatagcagccagtttctcgagtttgcgcgacagtgccactggaacaatggctcattcatgtcagatttccagagagttgggcagcacacttgtgagaatccagctgtgaacaagccattgctgtctttaggagcttatgtgccaggtggtaaagtgtacatatgcaaataaaatggtaagatgattgcaagttgtcatgaagataagacagcattgtaggggtgaggtgaccctagattagacaggttggctgcagaaggcttctctgagggtgtaacacttgttttgagagctaaaggatgaacgggaggagcatcatgagtaggagggaggcaggagctttctggatagaggcagcagcgtgtgtaaagagcttggggcactagaagaactggaagataaatggtgtgactgcagaatgatgagtgagactcaggaggcacgacatgaggctggagaggtgggcagggctgtgcaggtctcagtaaggagtttgattttattcaaagtgccagggaccattggatataaattcttcataaactgcatgcagaagagagattaaaaggttggcagaaaggaataaaaatgaaactggaggaccaagctggtaaaaattgcccccaagggtctatcagaatcctaactcacttagaccaataagatcagtggttacttatgaacaatacgtttgaaaagacctatgaaaaaacacgtgaaatttggagtttctctgtctctcatgtttcctgtaagtaattcgctagatatagagactcgattagattttgattcagtattttaggcaaaaatattttttgggtggtactgtgtacttcctattttgtcacaatgataggcatataattatatgtttagttccccactttaatgatgctaaaattaattagtgagttcaggtgttatgcctgattccttcatcataaacttctccatcaagtttcaccaaatcattttaacagtgattaataatcattggctagatacactatttcattagagttgcaaaataatagttttcctagcatttcttctttatttattggctaattttctttgattaagcactttcctaaatggagtattcaaaaaaaaactatataaacaggaaaagcaggataaatgcttgatttcaccccccccccccacccccagcagttttcagaacaatagcttggtgccttaacacctccacagagagatgaccaatggaatttttcttaatatcattattgactcactttttttattgtggtagaatatgcataacacaaaatttacagttttaaccatttttattatacatttcagtggcataagtacattaacaatgttgtgcagccatcaccaccatccatctccagaactttttcaacatcccaaactgaaagtcttggccaggcatggtggctcatgcctgtaaacccagcactttgggaggctgaagcgggtggatcacctgaggtcagaagtttgagaccagcctggccaacatggtgaaaccctgtctctgctaaaaatacaaaaattagccagatgtggtggcataagcctgcagtcccagctacttgggaggctgaggcacgagaattgcttgaacccaggaggcagaggttacagtaaaccgaaattgtgccactagtactccagcctgggtgacagagcaagactccatctcaaaaaaaaaaaaaaaaaaaaaaagtcttgcctattaaacagtaactccccattttccccttctctcagctcctgggcacaacctctcttctactttttgtccctaaaaatttgactattttaggcaccccatatatatggaatcacacagtatttgtcctttagtgtctggcatcttagcagagtatctccaaggttcatccatgttggagcatgttattagaatttccttcattaattttttttttttattgacagggtctctgtcacccaggctggagtgcagtggtgcagtcaagcttactgcagcctcagatgcctgggttcaagtgatcctcatgcctcagcctcccaagtagctggaactacaagtgtgcaccataatgccaagctaatttttaaattttttgtagagacagggtctcgccatgttgcccaggctagtctcaaactggcctcaagcgatcttcctacctcagcctcccaaagtgctaggattacaggcatgagccactgcttccagcctttcttcctttttaatactaaataatagtccattgtatggatataccacatttgtttatctattcatcttccatggacatttgaattgtttccaccttttgactattatgaataatgcttcggtgaacatgggtgaagaaatacctgctcacgtccttgctttcagttcttttgggtagatgcacagaagtggatttcctgaatcacatggtaattctatgtttaattttttaaggaagcaccatactgttttccacagtggctgcactattttatattcccactagcaatacacaaggcttccaatttctccatgtccttgccagcactttttgttttgttttgtttttgagacagtgtctcgctctccgtcccaggctggagttcagtggcccattgcgatctcggctcactgcaacctgtgcttcccgggctcaggtgatcctcccacctcagcctcccaagtagctgggaccacgcctggctatttttttttttatttttagtagagacgaggtttctccatgttgcccaggctggcagtggccagcacttattttctgtgttttgtttattttaatattagccatcctaatagggtatgaagtggtatctcactgtggttttgatttgcattttccaagttatattattccctagttgtactgtctgttcttgccttactgtaaagaaatacttgagactgggtaatttataaacaaaagtggtttaattggccgggcgcggtggctcacgcctgtaatcccagcactttgggaggccgaggcgggcggatcacgaggtcaggagattgagaccatcccggctaaaacggtgaaaccccgtctctactaaaaatacaaaaaattagccgggcgtagtggcgggcgcctgtagtcccagctacttgggaggctgaggcaggagaatggcgtgaacccgggaggcggagcttgcagtgagccgagatcccgccactgcactccagcctgggcgacagagcgagactccgtctcaaaaaaaaaaaaaaaaaaaaaaagtggtttaattggctgtacaggaagtatggcagcatctgctcctggggaggccttagggagcttttattggtggcagaaggcaaagcggagcaggcatcttaaatggcaggagccaggaccgagagagagaagggaggtgctgcccacttttaaacaaccaggtctcatgagaacccactcactattgagtacaaaggggaaaatccaccacatgatccagtcacctcctcccaggctccacctccaacattgggaattactattcaacatgagatttgtgtggggacacagatttaagctatatcactagtgattagtgatgttgagcatcttttcatgtgcttattagctgttcgcatatttcttggggcaaaagtctattcaagtcctttgcccatttaaaaattggatttttgtgtttgagttgtaggagttctttatatattctggatattaattccttttcccatatgtgatttataaatattttcatctatggattgctttttgcttgtaatgtcctttgatgcctaaaagttttgattttgaagtccagtttatctgttttttgttgcctgtgcttttcgtgtcctatccaagaaattattgctaagtctgaactcagtaatttttatatatttaatgattttcacccctaaatggttattctttttgatgcttaagttgtcccattattgatcgttaatggcacttatttttcgggttttctaggtgcttttgacatgagcctagtagtgttatatgagttccctgctttctggctttacaagaagtccggggcttatcggaaaaatttctgatcccagatccagaatcagccatttctttaactagttctgattctttttggtgggaaatggtattaagggcattcattacaattaagatgtaaattccagtaggtttttttttttttttagtagaactaggaaatacatactttttggaaagaaaaagatacaccatgatttcagactgatttacttccaattcaaatgaaggattaaaggatttttatatctttgattttatatttgtcttttctcatttgttgacagtaacaccagaggggtccagtcaaaacacgattttattgattgaccgattgatggagaccacctcactctgtcgcccaggctggagtatagtggcgccatgttggctcactgcagcctccaccacctgggctcaagtgatccttccacctcagcctcatcagtagctgggactacagggatgcactaccatgtctggataattttgtttgtttgtttgttttgagatggagtctcactctgtcacccaggctggagtgcagtggtgtgatctcagctcactgcaacctctgcctcccgggttcaagtgattttcctgcctcagcctccctggtagctgggactacagacgcctgccactatgcctggctaatttttgtatttttagtagagacgtggtttcaccatattggccaggctggtctcaaacccctgaccttgtgatctgcctgcctctgcctcccaaagtgctaggattacagtcatgagccactgcacctggccaattttgtttgtgtgttatagagatggggtctcactgtgttgcccaggctggtcttgaactctaaagcattcctcctgctttggcctcccaaagtgatgggattacagatgtgaagcactacacctggccgaaacacaattttaaacttgaaataattcttctctgtgtggctgtgccactaatttggtaaataatatagattcatttgtcttttgtttcatttttagggatatttttcttttttatatttgctttttgcttatatatttacgtagttctaaagataaaaccataagtaagatagattgaaagaagtctggctttcctccttgtctttgttcttctctatacgttgtaggtaaacatctttgttggtttttggtttattctcccatggcttattttaaaagctacaagcgtgtgtgtctgtgtgtttctgtattccctataccttacttcattcccattttatttcttctcgtttttatcttggcaatcatatttcttatttccaagaattcattgttgatttctacttcctttatgatttgtttgcttttggtttttttttctccccccgagatggagtcttgctctgttgcctagagctggaatgcaatagtgcgatctcggctcactgcaacctccgcctcctgggttcaagcaattctcctgccttggcctcctgagtagctgggattacaggcgcacgccaccacaccaggctaatttttgtatttttagtagagacggggtttcaccatgctggccaggctggtcttgaactcctgaccttgtgatctgcctgccttggcctcccaaagtgctcggattacaggcgtgagccaccgtgcccagccctgcttttaaggatgcactatctttccaacactgtctgaggaataccagtcagaatttcttttcaggtgttttttctgggacctaaaatatgtatttcttctgaggtctgatcaccttttcatcttagttgtccttttttgtccttttggttttccttcactgtctggtgatccttatcaatgaagaactgggttgttcatataggtaatttgcaggaggtccctctgtttttcaatagtcctcttgccttagtgagagttggctgattgaggaatgggaagtacagatgaaatcaggttgattaactggtttcccactcctgatttctctacctgctgattcaaagctgggcatttatccagctcctccaggaaaaagggctctgcctctctgttctcttttggccctgcatgttgtaaaaagtggccagctttgctctggtctgtcttgtaatatagtttcctctgctttctctccatcctctagaagatggcctgcagttaaatagactgtggccctcagaccttctcattactgttttgctgagattcccttgtgaatgtctttattgttatgtcactgggatttggggaggatggagaggtaagtgcacttgcctgtttagcctgtcgttttgaaatgaaactccttttgtcatcccatttctgacagtaggactgcttgccactctcttttctctgttggtttaaggactgaagtggatctaaaattattctctgtattcacaaatcatagctatcaatctttagtcagatgggaaaacttaattaattaattcagggactaaatttctctttatagctgcatagtccatgtaagtagaagttagttatcaatgaagtgtgtgatgcttcctgccctgcgattggtagatttctatttggttcaaggattgggtaacttttcaagacctttcctgtttgtcagtgacttttttccagagaagcagaaataacaaggcctgcttcctttgcttgctttgtgggaatgataatatcatcatcatcaaacatttagtgcttaatatgtgccagacatcattctaagtgctttatatgtataaacccatttaactcaataacagtggttactattatccttattttatagatgatgagacaggcagagagaggttaaggaacttgctcaaggtcaagctgatcctgacagccaagatctcaccctattagtcagacgcccagggccattctcttcttcacttcaatcgtcttatctttctaaagggaagtgcttcaagagattttcttaggatggctgaccacttttcatgtcttgtcaaccataggtataagaaaatcctctaatactgagtcttcatctagtttctttctttctttctttttttttttttttttttgagacggagtctcactctgtcacccaggctggagtgcagtggcatgatctcggctcactgcaagctccgcctcccaggttcatgccattctcctgcctcagcctcccaagtagctgggactacaggcgcccgccaccatacctggctaactttttgtattttagtagagacggggtttcaccgtgttagccaggatggtctggatctcctgacctcgtgatccgcccgcctcagcctcccaaagtgctggaagtgctgggattacaggcccggctttctttttttttttttttttttttttgagacagtctcactcagtcacccaggctagagtgcggtggtgcaatctcggcttactgcaacctccacctcccaagcgattctcctgcctcagcctcccaagtagctgaaattaccggcatgtgctaccacgctcggctaatttttgtatttttagtagagacagggtttcactgtgttggccagactggtctcaaactcctggcctcaagtgatctgcccgtctcagcctcccaaagtactgggattacaggcatgagccaccatgtctggccttcgtgtagtttcaagcatgtcctttattgcctgaaatagaaatcgctgatgactctaattgtagaaatgaatattttaaatgatataattatggctgaattcagttttaatctgtggagaacttttgcaaattatgttgaaaagatgttacttaaaatgttcttttctgctatgtatttgattttttaagtagcattaaaacttaagagtacatgacaaatctcacaagtcttggctacactaacttctgaggtctttcacaatgcgtatttatttccatgcagcatgaatagtggattcataaatggtgaatgttttcccagtgaaaattctttttaagaaaatacggaaaagaaatgtccttaaatggtttgaacatattttagcctgacaggcagataaatatgagggtggagaagcatgtgaaaaacatttagacagcattaagaagaattttattaaaataatgataataataataattagctgggcacggtggcatatgcctgtagtcccagctactggggaggctgcagtaggaggatcatctgagcccaggaggcagaggttacagtgagccgagatcacgccactgcactccagcctgggtgacagagccagacccagtctcaataaataaataaaaacagaaataaaataataaaatccaggtgttcgtgtgtgtgtgtgtgtctgtgtgtgcattttcaacattttgtttcagaaatgttcaatcatatacaacattggagcaagtgatatgatgcacctcatgtacccatcacctaacttccaacagtattttgtcaggggatattatgatcactgccatgaagacaaatgcttaggtaggtattaccaccttctctgtacattgtttcttggcaaaatgtcatttgaaaatgatagaactcgggcaggcatgatggctcatggctgtaatcccaacactttgggaggctgaggcaggcggatcactttgaggtcaggagtttgagaccagcctggccaacgtggtgacaccctgtctctactaagaatacaaaaattaatcaggcgtggtatcgggcacctgtaatgccagctactcaggaggctgaggcatgagaattgcctgaacccaggaggtagaggttgcagtgagccgagatcgcaccactgcactccagcctgggcaacagagtgagacttcatctcaaaaaaagaaaaaagaaaatgatagatcttgaatgtatttcagttccatgaccttttttttttgtttgtttcatcgtgttagctaggatggtctcgatctcttgacctcgtgatccagctgcctcggcctcccaaagtgctgggattataggcgtgagccactgtgaccagccagttccatgacattttaaaaaaattcaacactatctagttttgattacaacaaagatctgcacaggaacaccagatctgttaagaattagcgaaaactagtttacatgttttgaatgttttttctctctgcttgggtaggaaccccaggcgtgactgtgatacttgagcagtcttgttagaagcaattatgttacaaacagaacttttcattgatctgtgtaaccagccccttggttctcagaaaaagagttgtggccaggcacagtggcacacgcctgtaatcccagcactctggaaagccgagacaggtggattgcttgagcttaacagccagagactggtgaaaccctgtttcaaaacaaacaaacaaacaaaacaaaacaaaaaaacttatttatcactttggaagggaggtgcctttctgtattattattattttttgagacggagtctcgctctgttgcccaggctggagtgcagtggcatgatttcggctcactgcaagctctgcctcccgggttcatgccattctcctgcctcagtctcccgagtagctgggactacaggtgcatcccaccacacctggctaattttttgtatttttagtagagacagggtttcaccgtgttagccaggatggtctcgatctcctgacctcttgatctgtccactttggcctcccaaagtgctgggattacaggtgtgagccaccgtgcccagccaacctttctgtattctttttttttttttttgagacggagtctggctctgtcgcccaggctggagtgcagtggcaccgggatcacgccattctcctgcctcagccttcccagtagctgggactacaggcgcccgctaccacgccgggctaatgttctgtatttttagtagggatggggtttcatcgtgttagccaggatggtctcgatctcctgacctcgtgatccgcccgcctcggcctcccaaagtgctgggattacaggcgtgagccaccatgtccggcctttgtgtattcttgaatacacaggaatattggtgagaatccctgagttgcactacagtcggcatcatcaggcgtcctcattcttgtggctgtcagcagattttcagtggacccccagtttggctctcaaattatagcatacatcagaatcatctggggaacttgttaaaaaagtgtattctccaaaaaattagtcgggcatggtggcgggcgcctgtagtcccagctactcaggaggctgaggcaggagaatggcgtgaacccagggggcggagcttgcagtgagccgagattgcgccactgcactccagcctgggagacagagcaagactgtctcaaaaaaaaaaaaaaaaaaagtgtattctctgcttctctcccaaagattgattcgttagatttggattgcatcccagtaatcagtatttaaatagtcattccaggaagggtgctatcctgattctagtatcagagaaggaagtccttaaaagccattgttggttttcactggctgctactaggtttttttgttgttgtttgtttagagacaagatctcactattttgcccagactggactcgaagtcctggactcaagtgaccctcctgctttggcctcccaaagtgctgggactgcagatgggcaccactgtgtccagccctcatcctagttttactaaggttggtaggtggtgaaaaaaattgctaaaaatgttttcatcctttaacatgctcagtgagtgttatgacaaccccacatagacttttactgcctacagacagatttactgtcacagaggttgtcttagttcaggctgctttgacaaagtactatagactgggtagcttataaacaacagaagcttatttctcacagttccaaagtctggaggtttaagatcagggtgccagcactgtcaggttctcatgagaaccctctttcgggatgcagactgctgacttaccatgttctcatatggcagaaagagagtgaactggcctctttttataagggcactaatctcatttatgatggctgcaccctcatgacctaaataccttccaaaggccctacctccagataccatcacaatgggaattagatttcaacatatgcatttttggggaaacattcagtccgtaacacaggtgcacccttagttgtgggcaattcagttctgatgctgtggtctgatgaccacaccctgacaacataggtgcatagtgggtagtatgattgcaaaggatctcgtgtttttctctgtggttccactaaattctttagtccaagccttaggcctcccctgcttggtcacctgttggaccaacactaggtacaggaagtgcaggaagctcagtttacaaaaagtcatctggtgcttccagctgtatgtagcttcctctgaaagaaaaggaagcgtggggagtgtagaaagcagttagttcttcacctgaggctgcagttccaaaactgaatggaaactgtggtgtttgggaagtgtgtttgactaaagtttcctttcctcaatttctcaaaggaaactgtgactcttcccccaccatcttccaccccttcagtttccatacatacaagaaagaatgatgtcctggagcaacctctggagaacaactgtggggcctccccattacaaaacagcctcccctgtgtgcaatcagaattgctttcgtctgggcagaaccatacaacacacagctgggctgtgtggagagctgtggccgactgtagggcttgcccgctagtctgtattttcccctacatttctctacctctcatatagtggaattggtaccacgcaaccacctctggcctttgatggtggcctttgacatgcaaccacctcaaagccaaagggctttgaagggaggtgatgtgtgtcactttcagtgggaagtattaaagagtgggtatgagttttgactttctttttctgtgctagggcaaccatgggagacataagttctagtagtgtccctgtaagctgaagaagggctgctagacccacagtgaatttttgtgaacaagaagtaatctgggctgggcgccttggctcatgcctgtaatcccagcactttgggaggccgaggcagtcggatcagttgaggccaggagttcgagaccagcctagccaacatggtgaaaccctgtttctaccaaaaatacaaaaattggctgggcatggtggtgtgtgcctgtgatctcccagctactcaggaggctgaggtaggagaattgcttgaacccaggaggtgaaggttgcagtgagccaagattgcaccactgcactccagcctgggcaacagagcaagactccgtctcaaaaacaaaaagtaaatctggttgggcatggcggctcacgcctataatcccagcactttgggaggctgaggcaggaatcagttgaggtcaggagtttgagaccagcctgcgcaacatggtgaaaccctatctctaccaaaaatacaaaaattagctgggcttggtgatgcatgcctgtagttccagctactgtggaggctgaggcaagagaatcacttgagctcaggagctcaagaccaggtaggttgcagtgagccaggatctcacctctgcactccagcctgagtgacagagcaagattccatctccaaggccaggcatggtggctcatgcctgtaatcccagcactttgggaggccgaggtgggcggatcacaaggtcagaagatcgagaccatctggccaacatggtgaaatcccgtctccactaaatatacaaaaattagctgggtgtggtggcgcgtgtctgttatcccagctactcaggaggctgaggcaggagaatcgcttgaacccaggaggcagaggttgcagtgcgccaagatcatgccactgcactccagcctggtgacagagctagactctgtctcaaaaaaaaaaataaaaaaaagtaaatattaggttaagccatttatttcaggatttgttactgcagcatagcttgatctgtctgccagtttgaagttctgagagtcaagatacctgagtttgattctgagactacatgtggtctagtgcaagacctttaatgtcctgaatcccctttttaatatataaattgaagggtttaagttagatgatcatgaagggcctttttggcacttaacattcacagatgctggatggcagcactcaaatgcagatgttccttgacttatgatgggagtttatgtcctgataaacctctcataagttgaaaatatcctaagttgaaaatgtaaggaccgggcgcagtggctgatgcctgtaattccagcactttgggaggctgaggcaggaggatcgcttgagctcaggagctcaagaccagcctggggaacatggtgaaacccagctctataaaaaatacaaaaattaactgggcgtggtgctgtatgcctgtagccccagctactcaggaggctgaggtgggaggatggcttgagcccaggaggcggagcttgcagtgaaccaagattgcaccactgtactccagcctgggtgacagagccagaccctgtctcaaaaaaaaaagaagaaaagaaaatgcatttaatattcctaatgtaccaaacgtcatagcttagccttgcctacctgaaatgtgctaagaggacttcactttagcctgcagtttggcaaaatcatctaccacaaagcctttttttctctctctctctcttagagacagggttttactctgttacccaggctggagtacaagggcacaattacagatcactgtaacctcaaactcctgggttcaaatgatgctcccacctcagtctctgaaatagctgggactataggtgacctggctaatttgaaaaatttttttgtagaggtggggtctttctgtgttgcccgggctggtcttgaactcctggcctcaaatgatctttccagcttggcctcccaaagcgttgagattactgttgtaagccaccatgcccagctacaaagtctattttgtgataaagttataaagaaatttggatcaaaactcaaaacttgaagtatagtttctactgaaagcatattgcttttttttttttttttttttttttttttttttttttttttttttttttttgagacagagtctcactctgtcacccaggctggagtgtagtggtgtgatcttggttcactgcaacctccgcctcccaggttcaagcgattatcctgccttagcctcccaggtagctgggattacaggtgcctgccacaatgcccgactaatttttgtattttttagtagatacgagctttcaccatgttggccaggctggtctcaaactcctgacctcaggtgatccacccacctcagcctcccaaagtgctgggatcacaggtgtgagccaccgcgcccagccgcatattgcttttttaccattgtaaagtagcaaaactgtaagtcaagccattgtaagtcaggaaccacgtgcacacttttctgattgatgtacaaaaaggagactaagtctggcactaaagtcatccctggaaaacttatttattattattagtttttgctattaaatgagaagttagttatgtgaagaaagtgacaaagatgaagtaatacttttttaaaaattagttttattgagatataattcacataattagtttatttggctcatggttctgggaagtccaaggtcatggcattggcatctggtgagggccttcttactgcatcaccccaaggcgaaaggtggaaggacaggagagctcaagagagcaagagatggttgaacttctgtaacagattcactctcacaataaattaaaccactcctgtgataatgccattaatctattcaggaggacaagagccttcatgacctaatcatctcttacaggtctcacgtctatacactattgcactggggattaagtttccaatacaagaactttggatgacatttcaagccatagcaaccactatttaacttcagaacattttcatcactccccagaaaagctgtacacattagcaaggactcctcattccataaatctacttttttttttttttttgagacagagtctcactctctcgcccaggctggagtacagtggcaccatcttggctcactgcacccttcacctccaggttcaagtgattcttctgcctcagcctcctaaatagctgggattacaggcatgtgccaccatacctggctaattttttttgtatttttagtagagacggggttttaccatgttggccaggctggtctcaaatgcctggcctcaagtgatctgccccccttggcctcccaaagtgttgggattacaggcgtgagccaccgcacccgcccagatctacttttttatctgtgtagattgcctattctagacatttcatatcagtagactcatacaataggagtctccttgtctggcttctttcacttagcacagtgtttttaaggttcgtccatattgtagcatttatcagaacctcattcctttttatagttgaataaataatccattatatgtctgtactacatttgtttattcatttgtcagttgataagcaattgggtcgttactacttttgactattatgaataatgctgctatgaacatttgtgtgcaggtttttgtttggacatatttcttcgtttctcttgggtatatacataggaatgaaattgctgggttatgtggtaacactatatttagcattttgaggacctgccaaactgttccatagtagctatcccattttactttattttttttttgagacagcgtctcactctgttacccaggctggagcacagtggcacgatttcggctcattgcaacctctgcctcctggttcaaccaattctcctgcctcagcctcctgaatagttgggattacaggcatgtgccaccacacccagctaaattttttttttttttttgagtctcgctccatcacccagggtggaatgcagtggcgtgatctcggctcactgcaaggctccgccttccgggttcatgccattctcctgcctcagcctcccaagtcacccagctaatttttgtattttttagtagaaacagggttttgccatgttgccaggctggtttctgacccctgacctcaaatgatcctcccgcctctgcctcccaaagtgctgggattacagtcatgagctactgaattcggcccattttacaatcctatatgcaatgtatgagtgttttgatgtttccacatcttcatcaatacttgttactgtctttcttactgaagtaatcagttttgataaagcagccatatggcaaactaaacagtgaagagatttttacatgcatattagcttaagttgctctctaaacagttgtagtgtgtattggcgtatttataaaaatttgcactgtgagcttagcactaaagtaaatgttaatgactaataacataattcttcaacttgtttagcttttggaaaatttttcatttcaaaaatgaagcactcttgaagggaaaaaaaggagtaaataaaaaatgagttgtttgatcctctctctcttgattcaccagatgtaattgttctcttggagcatttttttttttttaaagacagattctctgttttccaggctggagtgcagtggtgtgatcatggttcactgcagcctcaacttttcaggctcaagtgatcctcccaccttagcctcccgagtagctgggaccacaggtgcacaccatcatgcccggttaatttttgtatgtttttgtagagacagggtttcgccatgttgcccaggctggttgaacttctgggctcaagtgatctgcctgctttggcctcccaaagtgctaggattacaggtatgagccactttgcccaacctcttgaagcataaacatataaacacacacacacacacacacacacacacatatttcttttttttttttttttttttttttttgagacggagccttactctgtcacccaggctggagtgcagtggtgcgatctcagctcactgcaacctccgcctctcaggttggagtgattctcctgcctcagcctcccgagtagctgggattataggcacgcgtcactacacctggcttatttttgtattttttagtagaaatggggtttccttctgttggccaggctggtctctaactcctgacctctcaggtgatccatctgcctcagcctcccaaagtgctgggattacaggtgtcagccactgtgcccggttgcataaacttatttttataaattatgtgcttctaaattatcaggtggactgtgccttacatgtataggcttgagtaggctgagcatggtggctcacacctataatcccaacacttttagaggccaaggtaggaagatggcttggggtcacgagttcaaggccagcgtggacaacatagtgagaccctgtctctacaaaaaaaaaaaaagaaaattaggtgggcatggtggtgcatgcctgaggtcctggcccctgaggaggctgaggtggaggattgcttgagcccagaaggtcaaggctgcaatgagccatgattgtatgactatactccagtttgggtgacagagagagaccccatctctaaaagcaaaaaaaaaaagtgaaataaaataaaaaatcgttgctatcttttattaatattctgttttgggagacattattcttatattttcctcacactttttaaatgtggtttcttttagttctttgaacatacttaaattgacttaaactcttgtctgttaagtccaatatctgggcttcccttgggaagagttttctattgttgttttttccctttatatgggctatattcttttgtttctttgcatatcttccaattttttgttgaaaactggacattttattttattattattttcagacagagtctctctctgtcgcccaggctggagtacagtggtgtgatccaagcaattctcatgcctcaactgcctgagtagctgggactatgggtgggcagcaacacacctggctaattttttttgtattcttagtagagacagggtttcaccatgttggccaagctggccttgaacccctgacctcaggtgatttgcccacctcggcctcccaaagcactgggattacaggcttgagccactgtggccagccaactggacatttttaatgacataatgtggcaactctgaaaatcagattctcctccctctccagatgagctctaagtcaggtaaaatacagagatatttgcaaatggggtattttggggaaccaccagacaggttaaataatgccaatttcctgggaatggtactttgaaggagctgtagcccagttctgcttcctctggtaactgccagtcttctggtcttcaatgtggatgcagctggtagttttcaaggctattatggagctggagagctaggaatgggactcagtcaagttaaaatgctacaaaactcactgttcttaccaggattcagctatttatctttgataaattatccccagtttgctaaaagcctatttccagagttctgaaaaaggtgattctattattttgccaatttttcattgtttttatgtagtagagaattttggtcagggaaagtccttattctgccatttttgatgatactctttccctcccctttttaggcttttattttcatgaatcttgtatctcttggtgttttgttttgttttgttttgttttgttttcgagacagggtcttgttttgtcacccaggctagagtgcagtggtgtaatcatggcccactgcagcttaaaactcctgggctcaagtgatactgctccctcagcctcccaagtagcagagactacaggtgcacaccaccatgaccagctaattttttaaattttttgtagagatggggtcttgctctgttgttcagactagtctcaaattcctggcctcaagcgatcctcttgtctcagcctttcaaagtgctgggattacaggcttgagccactacacccagcctaatttttgtatatgatgtgaggtcggggtccagattcattttttcatgtggatatttagttgtcccatcaccatttattgaagagactgttctttccccactggatgtttttggcatcctggtctaaaatcagttgactgtagatgtatgggtttatttctggacttctaattctactccattgatttatacatctttccttatgccagtatttcactgctttggttactatagctttatagtagattttgaaatcaggaaatattacttttacaacattttttctttcagtatttgttttagtcatcctggatccctcgctttttttttttcttgcgtcagtttgtttgtacaaatagcacaggaggatccccgccccatgcagacggcagcccgagggggtcgcagcagtccttctgttctcacatttgtagacagagatatctactctgaagcctttgtaggggcctgggcacctttgggagcttgagctggaactgaagctggagctgcagtctgggcgctgatttgatccttggccttggcctttagccggcacagcctgagtcccttggcagtgcgggcacgagcacacttcccaagcttggggtgggcaatgtaggcaagtcgatcgagcttgtggctgacaccctttgggatcttgggcttaacctccttgggctttacgagggccttgatagcctcggcacgtgcactcatggccttggcattgttggcctgcatcttcttgaggcccttcttgtgcttcttggcaaagtgcatgttcctcaggaacctggggtccatccacttaagagatttgtatctttgtgatcggggtttcttgatagcatttctgtgccattttcgggactggttgtgtgtggtatggttcttggacttggccctgtctgtaccttaagccgcagctcccgaagcacctagaactggaaccctcacatttttatatgattttagggctttgttttatttttggggacagagtcttgcagtgttgcccaggctgctcttagactcctgggctcaagtgatgttctcaccttggccacctctaagtacctaggacagcaggcatgcactaccactcctggcttccaaatgaattttggggtcagcttgcccatttctgtagaaaaggtaattgaaattttgaggccggcatggtggctcacgcctgtaattccagcactttgggaggccgaggtgggtggatcacttgaggccaggagtttgagaccggcctggccaatatggcgaaacctcatctctactaaaaatacaaaaaattagccaggcactgtgacgcgcacctgtaatcccagctacttgggaggctgaggcaggagaatcacttgaactctggaggtggaggttgcagtgagctgagattgtgccactgcactccagactgggcgacagagcacaactctgtctcaaaaaaaaaaatattttgataaaaattgtgttgaatctgtagatgaatttggtgaaatagtataactttaagcattataagtttcatttagagaaagtttggaagtatgtaaagtgaaaaagagtttaatgtttgtggttttttaattaggtaagcatataggtctcacttggtcttccagatctgtcaaaggaatgggggcaggctctcctagagccagaggcagccgcggtagaggaactaggaagctggtgcaccactgaacaaagatagagtgtttctcagggctgcataagacactcactgtggccaactcaggtgaaggttttccttcagaggccacagagtctccacgggaacagcctgccccgcttcagcattcctgtagagtgcttctgttgtatatcagaatctataaattgtggagcactcgggtggggatagatgtgattgccttatttgtcatgaatttgaaaaaagaaaacattttggaacacattttttacaagtagccatttgatatttgtttcttgaaaagtttatgagattttttttaaagagctcaaattttgttgaacatagagccataaataatggttgttttattgactttatatgttatgtgtttgtatccacagtgtccttctcatctcttgcctttgtaacctacctaattcctgtgttgccaacacaatcatagaaatacaaaggaattatggtaattggccataagtgacgaagtatgagttacatttaattatatattcaaaaaaggaaaatagaaaacctggttatcaataagtagacgaaactatataccaccattacataggttgcagttgaatatgtggtcaagcacggtggctcatgcctgtaatctcagcattttgggctgaggcgggaggatcacttgagctcaggagtttgagaccagcctgggcaacatggcgaaacctcgtctctacaaaaaatacaaaaattaaccaagcatggtggtacatctgtagtcccagctgctccggagactgaggcaggaggattgcttgggcctaggagttcgaggctgtagtaagccaaggtcatgccactgcactctagcctgggtaacacagtgagactctgtctcaaaaaaaaaaaaaagttggccaggcgcagtggctcaggcctgtaatcccagcactttgggaggccgagacgggtggatcacctgaggtcaggagttcgagaccagcctggccagcatggtgaaaccccatctctactaaaagtacaaaaattagccaggcatggtgggcgcttgtaatcccagctactcaggaggctgaggcaggagaatcactggaacctgggaggcggaggttgtggtgagctgagaccacgccactgcactccagcctgggcaacagcaagactccatctcaaaaaaaataataataataagttaaatatgtggtaaatgtgactttcagtgaaacgtatttgaacttttgtttgggagagcagatggtttcaagcaaatgttattcctgattttagctttatgagaagagtcacagtattccgctgttgtaggtatcagaaactacaaccagcgatatccagattctgctatttgaacctatccagagtcaggggttctaagaagccacccaaggtgtgaaactggtataccttgccaggctcccgctctgcacacccagagggaaactggtaccggagtgaggattggaagaatcgtgtctgtaaaccgcctgccagccactcccttctccaggctctgtttctgcaccctgcacttaagcccagcttggtatccgactgtcccgtcctactttgggacctttgccgtggtggtcctttaccttgtgagtcccacctgtcccttttgcacttgtccaaacctatcctacaatcaaggcctacctcagaagaatatttttttcgtaacaacctttttgatttcccttgccctttgcccatctctgcctttgctgatgccccataaagtttatgagtgctgtgtgtgtcaacagccctcaccataatctgagtactcatgtgatcctcctgaagcttgtgagctcttcaaagaggaaaggagaaaatgctgaacgtggatccaggccctgttcaacgtgccagcctcagctttgaaggggccagtctagaatcatacttttttggttgcattgtttttgtattactacttgaggaattttctaacagtcatcatttcatagttcagtgctcactattgtacctgctcctctaaggttataatatgatttcttattcatttgtagcccacctgtgtggataatagcatcacaggagttattgtccagaattactgtagccttcctcactttatcttatttttccccccgacaggaaaggacttagaagccttacaaatacatctgtgcattcttgcttcagactttacaactgagggccagcccagtctggaagcatctcttattaatgttacaaggaaaccgctacctcagcaaacaaaaggaatggaggaggagacttacaacaaacgccatttaaaaaaaaaagaaaaacttgttttcaggaaacattagaggaaatttggagaatttcagcattgcatagaagcagccttacaggtaaacggatttgacgggcaggctctgtcaaaattctgcagaagtttgatcttccttcttaaggactttgtgtgaagtaattctttactgcttttaaattgctgttgatcagcttctgggtttttgggttctaacttttttgggtatattgaagacacagtgtattacattatattacatttttaaacgttaagttatttttctgccattgtaaatacaagtatcaaaatattcttgcaaagaagtaaacatttttctcagcaagcatatccttttagtaagagagtggaatgctaaacagttcttatccagcattttggacatcttttattttttgtcagagatcctgtctacactgaaaatattaattatataaacctgttgtctctcacctctacattggatcacatggtcacctgcctcatggaaatgccttttttaaaacttcgatttgcagaactccactatttttatacctagctacagttttgagaaagaagaatcagaaccctgacccacttacggttgctgggacaattccccctcccgcatgtattgctgcagtgcccaggacagtaaaatggactacaagcggcgcttcctgcttggcgggtccaagcagaaggtgcagcagcaccagcaatacccgatgcctgagctgggccgagcactgagtgctcccctggcatccacggccaccactgcccccctgggcagtctgaccgctgcaggcagctgccaccatgccatgccccacactactcctatcgccgacatccagcagggcatctccaagtatctggatgccctgaacgtcttctgccgtgccagtactttcctcacagatctcttcagcactgtgttcaggaactctcactactcaaaggcagccacacagctcaaagatgtgcaggagcatgtcatggaagcagccagtcggctgacctcggccataaagcctgagatcgccaagatgctaatggaacttagtgctggggctgcaaattttacggatcagaaggaattcagtctccaggacattgaggtagagtatcttttgtgtcatacttgtgtaggaaaatatactacaaaggtaagtgagaatattgtcttaagtttttttccaaatcactgtaatagtagcctttgtcctcttgctgttggtactctgtctttgtaaaaaatgtgtgcgtgccaggttctgaattgctttcatatcaaattcagtaggttaagggtaggtgtggtggctgtaaccccagcactttgggaggccaaggcgggaagatcgcttgagctcaggagtttgaggcatcatagtgagaccttgtctctacaaaaactaaaaaaattaattagctgggtgtggtggtgtgcacctgttggatagattttaaaaattacttttagctgttcagagagttaatctggcattagtttttccatccttctacatccagaagccctgactactccagaagcccagaagctgaggtgggaggattgcttgagcccaggagtttgaggctgcagtgagccgtgattgcactgctgtactccagcctggacggcagagtgagaccatgtctcaaaaaaaaaaaaaaaaaaaaaaaaagaaaaattattaaacaaaccagccaatattttatattgttgtctttcaaattttcaagtcagaacctaattttcaaataccgtactggtaaaagttattagtgagtactgagaattctaaatacgattatgagctttatttgtggattttttttttttttttgagacggagtcctgctccgtcgcccaggctggagtgcggtggcacgatctcggctcactgcaaggtccgcctcctgggttcatgccattctcctgcctcagcctccctagtagctgggactacaggcacccgccacctcacccggctaattttttcgtatttttagtagagatggggtttcaccatgttagccaggatggtctcgatctcctgaccttgtgatctgcccgccttggtctcccaaagtgttgggattacaggtgtgagccactgcgcccagcctttttttttttttttttttttttttttaagtcagtttcgctcttgttgcccaggctggagtgcaatagtgcaatcttggctcactgcaacctccacctcccgagttcaagtgattcttctgcctcagcctcctgagtagctgggattacaggcatgcgccaccatgcccggctaattttgtatttttagtagagacggggtttcaccatgttggtcagactagggtctcaaactcgcaacttcaggtgatccgcccgcctcagcctcccaaagtgctgggattacaggcaggagccaccgcgcccagccgttttttttttttttttttttgagacggagtctcactctgtcacacaagctggagtgtagtggcacgatctcagcttactgcaacatcgcctcccaggttcaagcaattctctgcctcagcctcccgagtagctgggattacaggcgcccaccaccacacccggctaactttttgtatttttagtagagacagggtttcaccatcttggccaggccggtctcgaactcctaacctcaagtgatccacctgcctcagcgtcccaaagtgttgggattacaggtgtgagccaccctgcctgtcctgtggatttttattatattgaatctttggtttttagagagtcccacacgtttatagaataatttttccaattctaaattcacagttgctaatattcagatgtatttgagtcttcttcagtacatttcttggggtctttgatagttttttttttttttttttttttttaaaagacagagtctctctctgtcgcccaagctgaagtgcagtggcactatctcggctcactgcaacctctgcctcctgggttctagcagttctcctgcctcagcctcctgagtagctgggactacaggctcacgcagccatacccagctaattttttgtattttagtagagatgggttttcaccgtgttgcccaggctggtgtcaaactcctgagcttaggcaatccacccacctcatccttccaaagtgctaggattacaggtgtgagccaccacacccagcctctttgatagttaaaatgaaatattattcttttagggctctagattacaatgtaagattagaatacaagtttcattcaaagtaaagatgaccttttttcttgtcttattttaggaaatgatttattcaactttgatctcttatattcgtttgatagattttaaaaattacttttagctgttcagagagttaatctgacattagtttttccatccttctacatccaggtgaagttcttggatatgagatcctaggaaggagaatgttccttaccccatcctggggttaagatcaccagtcttttgggtcggatctgattatttaggtgcctgaataagctaactaacactgctttgggttaaccaaaaaaagaacttgacttttaagtaacacaactaatttttactgtgtttaaaagtgattttgaaggaatttccaagaagaacttagagttatttcttaagagacacagcatcattggtataaatcagggtttatcaagctttttctatgaagggcagacagaaattttaggcttcatggaccacatgtggtctctctcacatattctttgtttttgtttttgttttgagacgaagtttcatcttgtagcccaggctggagtgcaatggcgtgatctcggctcactgcagcctccgctgcccgggttcaagcaattctcttgcctcagcctcccgagtaggtaggattacaggcgcccaccaccatgtctggctaatttttgtatttttagtagagatagggtttcaccgtgtgggtcaggctggtctcaaactcctgacctcaagtgagccacccacctcagactcccaaagtgctgggatttacaggtgtaagccaccgctcccggccttgtttttatttttattttttacaatcctttaaaaatgtaaaagtcagctttactttgtgggcccatctattctatggatggggtttggccgatgggttctagtttgctgcacctgctggtataagtgtatagtcacttccttgggtcagggtcattctactttggatctatctttgtaatttttttttttttttagacagagtcttgctctgttgcccaggctggagtgcattggcgatctcagctcactgcaacctctgcctcctgggttgaagcaattcttatgtctcagcctcccaagtagctgggattacaggcatgtgccaacacacccagcaaatttttgtatttttagtagagacagggtttcgccatgttggccaggctggtctcaaactcatggcctcaaaatgctgggatcacaggcgtgggccaccgtgctcggccatctttgtaatttttttttttttttttttgagacggagtcttgctctgttgcccgggctagagtgcagtggcgtggtcttggctcacagcagcctctgtctcctgggttaaagcgattcttgtgcctcagcctcccaagtagctgggactgcaggcacgtgccaccacacctggctaattttttttgtatttttagtagagacgggtttcaccatgttgactaggctggtctcaaactcctgacctcaagtgatccacctacctcggccttccaaagtgttggaattacagaggttagccaccacgcccagccatctttgtaatttctaattgtttctatgatcatattttatacccagggatactgtcattttaaagtgtgtataaaatggcttgtcataattttatttttatttttattttttatttatttatttatttttttgagacagagtcttgctctgtcgcccaggctggagtgcagtggcgtgatctcggctcactgcaagctctgcctcccaggttcacgctgttctcctgcctcagcctcccgagtagcttggactgcaggcgcccgccaccacgcccggctaatttttttgtatttttagtagaaacggggtttcaccatgttaaccaggatggtcttgatctcctgacctcgggatccgcccgtctcggcctcccaaagtgctgggattacaggcgtgagccaccgtgcccggcgggcttgtcataattttgtttaaaaattcaacacataaaaaagcatgcctttacttctcaaaagaaacgtaagcagtgaaacttctactttcctttagcacctcattcctttccccagaagtgaccattagtaactggttgttgtatgccattccagactaccgtctgtacatgcatggatatgtacagatgtgtgcagctttgacttttacataaagaaccacgttgttcatccaccattgtgcctggtcactgcttgatagagatatggcaagacaatagttaggaacactttgtcctctcctagaaagtgttgaacaatcttagactctgacagctgtcaccccatgatgacatagcgctcttagctttattcaggacttcaggcaagagtggtttgaaatataaggccaaaggcttttattttaacctgagcattactgagctcttcttcaggacatgcttgcaggtattggaggaaacagagcttgacctgcagggccctttgctttccaaccctggagggcaagtgcgcctgttgcccagggcaggacaattagagaagataaccagctgtgagcagtaggggcttggtaagccgctggggcacagcagtacctgctttgtttcttctgctttcctgggactggcattgaccactgaagctgagaacgggaaatacttattgttgtagtttggaattttgacttggctttccacattgaaatgctgattagatagttggaatactaccatgtttttttgtacataatgggctgaacaggctttcccagacgagtctggaaactaagtatttggtgggttttccaatttatgcgtctattctgagtttcaaacagctgacttacaagtgaatttctaaatgtgattgccaagcataggcccgcagacttcacgtttcactttttccccagagcaatatttgttgtttctggaatttatgtactgccaggggatttagccataggccaataagggtctctctcagaattttcagcaactcagatgaaatggctaggcatttggattttttccttttggttttttaaggatttttataagcaaggccctgagagtcactttgacattcatccctggggaaagaggtctgtggcctaacattgccaggcaaggcctctactcaggagctcagtccaggactgtgggtgagaaaagctctggattcgagagtattcaaatatttgaccatttaagagttaggacaaaggatgatcctgtccccttgccatgtggccagtgcatgtgtgcagtgttcccaggtgcttctgacttacagccaagtttgggctgtggttattgattgacagatactgatgcctttgtccaggaatggtggttgctgactgtgtgctctgccaccctgccttggaaccagcagggcatatgtgagtcctgtccagtctatactcaccagtgactttgccccttagcccgagtggttcaccctcacagtctctctgttagagaagtgagttgtgactatggggtttcactagctgactagtgcctgtgacactggtacatcagcctaggaagtcagttactgggcacagagtcagaagacctgggtttggaaggtgacatctatcacttaaataaaattactttttcagtggaagtgtacataaataaaagaatcaaagtgacttgtgatttgtgcattcattccacagatatttattgtatgccttgtttctgcctgatactactccagcatgtcgattgcagtagtgaacatgacagaaatctctcccttcatgtagctagaagggagtttcgatcttagagaaggtagttagaaaaggtaccactgagaaggtgacattcgagtaaaggcctgaaagggatgagagagcaagcctgttggcccagaaaagaggattccaggcggagggagcgccgagcacagagtcccagaggcaggagccagcctggagtgttggaagagcaggaaagaacctgctgtggctaaaacagagtgaatggaagggagagaagcaggggtgaggtcagaagggtaaagaggggccactctggtgtctgttctgagtagccaggtaggaggcaaggtgaggtacacctctgaagggcaggggatgggagggcagcaggctgggccctgccattcttttgtagtgagcagcgatgccacttctccccttgccttcttcatactgggtagctccagggctctggttttacgttgggtcctcagtgttgagaggtgttggtcctctatgtaggcagtccaggaacccagggcagccatggggctcccaggagttgtatgtctctaaggagactgtattttataaattccagcatttttattgacttttcaagtatttaccatcttgtgaataagcagccagacttatatgtatatatacgtattatatatatatatgccagacatatatataaaatatgtattttttatatatgtatgtatatatatacacatacgcacacacatacatatatatacttatatatacatatatacttatatatacatacttatatatacatatatacttatatatacatatatacttatatatacatatatacttatatatatactatatatacatatatacttatatatactatatatacatatatagtatatatatactataaaatatatatactataaaaaaaaaatatatatatatatttttttttttttttagagattaggccttgccatattgcccaggctagcctcgaactcttgggctcaagcagtcctccagcctcagcttcccgcgtatctgagactgcgtagctgagactacaagtatgtatcactgggcctggctctcaaatctttacacagttgcatcttggctttcagtttgacacaacaacaaatttcttttgtatactatgtgattacctgtgaatatgtttgaaataatttatctgtgagtgctgactgactcttaattaaggaccttaattcaggtatattaacatttattttggatagatatataccagaaatattgtagagtaacaataatggaaaatattagaagctggtttcaaaaatacgatttgcattaaccttaatggaattgaatgtgcatcctgttccttttttttttttttttttttttgccctaaaggtaaaagtaagtgttacttgttttgactggtagatcttctgtaacagattatggagtaaatatttcctaatggtatgtgccagatgaaagttcatattgctgctgctaatcagaaactgaagttcacctcataaaaagcttgtatgaatccagttttgaaacttgctaatttcaggtcagtgtttttggcttacttttttgctgaggtgaatctgctattacctaaattgtcttcagactttagcctgtagaggaagctgtacttaattaagcagctggaatttgggtgattctgtaaatttgcattgtggtcaacaaacatgatttaccatctgtctagcccattctacgtgggtggaagccaccaaggccattgggcatctgtcactgtggagggactggaccctttgactttgatttgtcaagacaagcatgtgcaaccaactcattattctgataaatgctaattaaaaggagaaaagtaaggaaataagcaaatttcctgcttttccagtagaaactgtttttcatggtaaccaaatagccctaatggatgagagaaaaatctccactttgcagactgtgatcaattcggtgactcaaccagtggccaacagtggaggatgaaaccatttgttggaaggttgctgaggaaccgcatttgggagaatcaggccttccgcacccaaatctcattgatcagccttagtgtcatggaaatggagacaggtcatcacgtctcctgatgtgctgcagcaagaaccgcacaacacatctaatattaataatattctacttctccctctttaaaaaaaaaaacaaaccctgaaataatctaatcaagcttctaaaatgaatccagtctacaggaaatgtggggtgtagtgacgcaagttatgcaataccacgagaaggcaaccagacaaattcacaatgtggcatatcctgtaataagttgacctgatttgttcaacaagtcagtagcattaaaagaaattacacagaatgtactgttctagattaaaagagttaagcaatataacaaccaaataaaattacctttttggggttgaggttcaaaccaaatgtaaaacataatttttaaaagataagttgggaagcttgaacacatactgagtcttggttgattgggatttacttcaaaaaaagaaaaaagatggggaaggatagatggtaaaagcatggcaaaatgttaatggaattgaaacttttaatttttttgtagagacaggatcttgctgtgttgcccaggctgtgagcccaggtctcaaactcctgggctcaagtgatcctcccacctcagcctcccacaacacggggattataggcttgaaccactgtgcctggccataggattgaagtgttttgatgggtacatgggggcttgttatgttctgcttttgtgtacgtttggaccttttccaagtttgcaaaaagtgagagagaaattcaggaatgtattaaagacgtaatatatcagagtacccaataaataactccatttcatggagggcttttcgcatgtgaagtggtcttctaacagaaaggggagcattattgagtagttagaaaacccaaggtgtagggatgaagagaaaagcaggtgttcttcaaaaaaaatgaagagagtaaaagtgaatcaaaggagaaaatgggaacagagaaaagaccgtctctgaaagtgggaggccagcagcaggtgggagtcaaggaaagaatgaaatgttgctaattttggggactagtgattgaatggcaatgttgctgtctttttagagagtaggatttaaaattttgagttgctgaaaaggcttgcgtgatgtgctagaaaaattaggtttggtgggcagattagaaggaaacaaataggagagttcatggaatataatttcagatagaactggctttcctgaattaattttttggttctagtcagcttaggagatctcacaggattggataatggcctgttctggcagcctccctcctctttacaaaccaggaacctgagcacccataaaacagcatttgcctgaagtccttctgaggccagcccatgtatgggttatgtgtcctatgtgtctgctgcctccccactgcctcgggccagtgcagtctagtgcagaggggcttgttggcagaggccatccccctgtgagaacaggctgtcttgcccctctgctaatggtgaaatgtccagagccaggaaatcagaaatagcgtgatgtagaggcacccctgagcacccttgctcgcactagggcccctcctgagtaggcccagccacctggcctgccttcctcttctcccagctgagccacccaccctcctcgataaatacacatgagctagctgcaagcattgcacagatgacaaggacaataaaagcactccaggactggtaggccagataaataaatagactggcactaggtgtgatgagtgctgtgatgcagatggaaaatagcctgaagtctgttgattcggcaaaactttcaactgctcctctccccgcacccagctcactgtgccagggccagccctcataccagaacctcctacctaactgagagcgcatctgagcaggggcagggcagagagcccagtaggccctggggagagtgaggagatactggtagttgcctctgaatatccaatctcttttttcttttttcctttcttctttctttctttaccttctttctgcccccgcccccccgcaagacagggtttcactttgttgcccagggtggagtgcagtggaacaatcacagttcactgcagcctgaactcctgggctcaagcaatcctcctgtctcagcttcccaactatctgggtctacaggtgcatgccaccacacccagctaaactgtatttttttgtagagttggggttccattacattgcccaagctgccattttttcttagtaacaaactctcattttgttttccatactgtacctggaataaggactacacctcttagttccttaaagctgggagtggtcacttgaataagatctggttcatgacggtgtaactagaagtactgcatgagattagtgggatatctccttaaggggaaattggtgctccctcctcctccaattttctaccgtctccagtgcgtgcagaatgactgatggccatttaaccatttataatcgtgaagtcacctagaaataggagcctcgcatgagtgtgccgagcagaaagctaggaagtgggctccttgtgatgccctggcgtctccattccaaccctggtccatctgctctggatttgttttaccttagaaaaaaataaacataatttttttttcttttcccccctctgagatgtagtttcgctcttgttgtccaggctggagtacagtggtgcgatctcggctcactgcaacctctgcctcctgggtttaggcgactctcctgcctcagcctcccaagtaggtgggattacaggcgtgtgccaccacacccagctaatttttgcatttttagtagagatggggtttcaccatgttggtcaggctggtctcaaactcctgacctcaggtgatccccctgccctggcctcccaaagtgctgggattacaggcatgagccaccacacccggcaacatagttcttatttaagccactgtattggttttgggtttgatttttttttaattaaaaattattattattatttttatttttactgtagagatggagtctcactgtgttgcccaggctggtctcaaactcctgggcttaagcgatcctcctgtctgggcctcctaaagtgctgggattacaggtgtgagccaccatgcctggcctgtttctgtttttgtttttgttttgttatatgtagataaacctgattctaattaagtggaagcaggaagactagttaaggggctattagagcagtctaaatgagggatgatagtagtttggaatagaagggtagcagacgtgactagaagtagttatgtgtatttttactgtggtaaaatatatgtaacataaattttgccattttaaccattgttaagtgttcagtagtattaagtacacttacattgttgtgcaagcatcaccatcatccatctctagaactttcttatcttcccaaactgaaactctgtacctgctcaacaataactcctggttgccctctcctcccagctcctggcaacgaacattctttctacctctataaatttgactactctaggaacctcgtataaatggaatcatagaatatttgtccttttgtgacaagtgtgtttcacttagcataatgtctttaaggctcattcatgttgtagctcgcatcagaatttccttctttttaaaggctgtggccgggcgcggtggctcatgcctgtaatcccagcactttgggaggctgaggtgggtggatcacctgaggtcacgagtttgagaccagcctggccaacatggtgaaaccccatctgtagtaaaaatacaaaaattagctgggcatgatggtgaatgcctgtagtcccagttactcaggaggctgaggcaggagaatcgcttgaacctgggaggctgaggttgcagtgagccaagatcgtgccattgcactccagcctgagcaacaaaagtgaaactccgtctcagaaaaataaaaataaaaataataaataaataaaggctgataaatattttagcagttgtattttgcatggtttatgacatgcgcacctgggtcactcactccctggtagtgctatttactgagatggggagtagtggggaagagtaagttcagataataggtctgtgatgcctattagatatcccatgggtgatttctacaggatagttgcatacacaaatctggagttgagggttgaggtccagaacttggagaccctcagtcagtagacagatgtaaagctagagaactgaaggaggtcatcaaggaagagcgtagctggagaatgagtaaaccctggggcactcccacatttacagtcagaagatgaataggaagccgcccaggagtctgaaactggaacagctggagagctaggaaggaaatgaagcaagggtgatgctgctgaggggaggtgaggcctcctctccaccccattccaagatttgccatggttacaccacttggaacactgtgcagatacagccggctgggagtgtccctgtcagatggggatattgggatccctgtctcagtgcggcaacatgggaggcatctagtgcgacagagcggcctcacccaagtgatgtgtcatgatgaggataatgttcatggagactgatttccatttgccagttccctgtttgtctttgtaatcagtttatcaatagtattcttgatggaagtgacaaattttaacaaaaagtacactcatgtgaacaaaaagaattttctgacctctgatgggctcttgaggccatatatcaggataacttaaatatgtttttatctctgcccacaatgtaaacttgtttatggagaaaacttgcattttgtttttatttattttttgaaacggagtctcgctctttctcccaggctggagtgcagtgatgtgatcttggctcactgcaacctctgcctcccaggttcaagcaattctcctgcctcagcctcccgagtagttggaatcacaggcatgcaccaccacgcccggctgatttttgtattttttgtagagacagggtttcaccatgttgactaggctggtcttgaactcctgacctcaagtgatccacccgcctcaacctcccaaagtgctgggattacaggcatgagccaccgtgcccggccaaaacttgcattttgaatgggaaaaattactcaagagtaattaacgtggactcagttatcttgagtggcctttcattttttccctggatgatattttgtaattattattattaggtatgctaaggtttatagcagtgtagctgctataaatataaatatagaaatgtaaaacttcctgtgtgtattgatatggtaacagatttttaatatattttggaaagcaaactataaacacacaatctactttttgcaaaaaaaaatctataggtacaaatatgggctgtttagtaatcgtacaatcaatggttatacctatttaggaatatttagaactatttgtatgtttgtatagctaatcttttcccccctgatttattgatggtgagtattactgatacaaaaagttttgtgcaccacagtgctttgcccatgaaatatgagctcagaaactgcctgtgctgttattttcaccagcagtgaagcagcgtgtctgggggcagaatgtactcttgtctgaattattagcatttggtgttggttctgccacccttgggcctgagcttgctttctccctcgtttgttctaaacatagcatggcaccttttgtatcctgtaggttattgctgactgcaaggagactttgttgttctttagttagttttttacatattagtttcagtaagcctgtttcttacatttttctactgtagcataatctttgtaagtactttctatagcccaggcatggtctgctgcattctctgtgtctctggggatgcatttaggtctttgtgtcacattctggtgtgtagctcattatgtaatgactcgaatgatcatcagaacaaaagatacctcattaagaacaaggttgaggacactaggaacctaatgtaacatttaaggtataaatgagtattgaagagaaagaaatgattgaatgctttggaatttctaatacaagcacccatcttgtacctacttacactggacttttaaagtgatcggaaataaatggttgtatgagagttttacttgttcctcattctaaagggatatgaaaaagatgaacttgagttcatgaagttgagcagaacaatgaacttagtgataaattatttgtattgatgtgaaaatcacaccatgttttgggaaatggggtggacttgggcactccatagttccaaccacatgcaggtattataggctgagtcaggcctgagcctagaagaggaataactgcaactaaactttgaaatattccaggaaagcagagttgacatgtaggttgatctgcaacaactacagtggtatagaaagggtggtcttggctgggcgcagtggctcacgcctgtaatcccagcactttgggaggccaaggcgggtggatcatgagatcaggagatcaagaccatcctggctaacacggtgaaaccctgtctctactaaaaatacaaaaaattagcctggcgtggtggtgggtgcctgtagtcccagctacttgggaggctgaggcaggagaatggcatgaacccgcgaggcaaagcttgcagtgagccaagattgtgccactgcactccagcctgggcaacagagcaagactctgtctcaaaaaaaaaaaaaaaaaaaaaagggtagttttttggtgctccaaatgggaaggccttaaattaaaatctgttttacaatctgaataaaatataaatatcatcaaaaagaaaaggtattctggttatgtacatgaatacaacatccttagcagcagatgttgtgtgtgtgcaagggaataggaaggtaaagatgcacccttctcctccaccatcaagggttgctagaaaacaggctctcattcagtagaccccgatagctgtctgtaatccatagctccttctctgattagtatttatccactattgtggcttcattctggatcttgtcataggtagaaagagtagcctggtggttagcaacacagttttcggagtcaaacagacctggtgtcagatccctacttattacctgcttgacattgagcaagtttctttatctctgtaaacttcagtgttatcatccgtaaaatgggtgaattgctcacaccccacagggatggttcaccaaacataaggtgcttggtatttaaacactcaataaatggtagctgttgatagagcttcactggcattttaaacttaaaaacctgcctttggccactctgctcatccactccccagcttcccccatgtgttctgcaatttgactgaaccacacagtccaggaaactttctccatgtgaaggagaaaatagctttccacagccctggggtcacactctcccaaacttatgtcaggaagacgcccaaagactggctcattcctgggtcaaggagagtggggtctgtttcaggagaggagctgagctaagacctgagatcctcggaggggaaaggtgggcagaggcaggctggaggttgagctctgtactctctcaagagaaggtggtggttatgcatctgttactctgggtaaatttttagagcagatatctgatgaaacagctgtttccaaggtccagcgttaaccattggtttgattggctttgaataagttatttacaacacagatattttgttacaatcataatttgtatgactgagttggtctccaggcatcctgggtaggagagggaggtgtacagtagctgagctgttgtcctcattccttatttataggaaagaagcttaggttaaatgactcatccaaggtcaaacacatcctaagtggtggagacaacacagacaatgccttttaaactgacctgtgtctcttcccccactccttcctacagcagggttctgccctccttactgccaccccacagcaagagggcttcctccacctcattctccccaggggtgatggccttgtcagagagcatcctgttcttgatctgggggccctccttcaggccttcagccattcctcagaactttgccccttagtaggggaggggacagggtagctctccctttgccctcggtcatttccttgaggagccttttccttcccatccgtctgtgttcctttcccagcagcacccggccttgcatatctgttcattgcctgttgtcttccccattagaatgtcgccctggcgagagcagggacttgctcattctctttccagtagtgttcccagctctttgtgcttggtgcatatcaggcatccccatcttatatatttattgagagaatgaatgactaagttgtgtccatcagagctgtgagagtgtgaacccagagctaatggagcatggcgtcttccctttttcctcctcctccagcttcccatagctgccaaggtgctgaggaaggagtgggaggaatagtttgtgtccctgaggagccggctcactccccctccctgtgtctgcagtgggtggggagattgaggaaaccctcagcctacaccagttaaggtggagttcctgtcacatgcaagccgatgccagtttagagtctgctgaaggcagtggggcacacaggtgaagggcatggacacttgagtcaggtgactggtccaccacatgcagattgtgtcccgttgacaaaattttgtagcctttctatgccttgatcttgttgtctatgaagggaggatgacctcatagggtggttcctgggattgaatgcgctagcccatgtgactctccagcattggtcaggtacaggctgtgtgctccactaaagctgtctgtgtgctctacaggactaaatagctgctgcttattctactcctggcacctgtctaactggcctaggtgcgctgccttcgtgtccctcaccctgcccagtctagcacagagcactgggggaagggctctgaaggaggtgtgagtggaagcccaggagtttggggggcttcagcctgtgatgtcggttgttgttccctctggagggcaagtgctttggtgtgagatttgtgtgcggttttttgtttgctttagtttggtcctggtgatttccacagggtgaggagggattcggagataataagtgtcttgctgggaactggcttgcccctgcttctccaagaagaaacagctctgactcttgggaactgagagggcgtgtggcaaaggtagatgctgaggcgaggcaaggcgagaggtccacatgcgtgccacaaggcagagagtccacgtgtgcacctgaggggagaggaaggttgagtcttactgtgtgctgctcaagggacaggacagtgcatgggcactgtgctggattttggttccttgtaaaaagcaatggctatagttccctgaccttcaccacttgcgtgaggcagtgggctgagggccggctgtgagtaggctctctcaggtccactcctgctcagctgggtgaattgcaaactcaataaagtaagttgttgtgaataagtaatctgcataagccaaagaaatataaaatatcttccacaaaaaattattagggagcaggataaaagagctgcaaaaggtttttgttggtattattgccaaatctgatgtgggcaaaacaactatgagaaattaggaaaaaatgtcaataatctggaaggtttgtggtcaagttgctttgtaagtggccagtttttgccctgtgttaaagaggaaataaggccgggcatgggagctcatgcctgtaatcccagccctttgggaggccgaggcaggtggatcacctgaggtcaggaattcaagaccagcctggccaacatggtgaaaccccgtctccactaaaaatacaaaaattagccgggtgtgatagtgcaccgaggtcagagaatcgcttaaacccaggatgtggaggttgcagtgagccgagatcacgccactgcactccagcctgggtgacagagcgagactccatttcaaaaaaaaaagataaataagaaatgatagagaacacattgtaactgtggtttatgcaagaaagtaacagggaggagcagcaaaggagctgtcagaacagccttagcccataccagaaggctgccagagaaatgcacaatcatatctgaaaatgtttgtggcacatagtatatatttagtatacatcttattataattacatattcatgtgtatagtattttttaagttaatttcctacttggactattagcaaccaatcactgatatatatcaggttaatgggtttctactgtactcatgagtggagctgtccattatattttcttgactcctggaagactggtctgtcagctttgtttcctaagactggaatgatgacatacaactatgttaataactatgttaacactcctactaaaataaccggtatatttggattccattttcaacggaatgtcttatggtcaaactggccttctttcagatttttagttgcatggtttttcctttaccttctgaatactgtatggacgtaattgctgttgtggatggctgtggttcagcaggagctcaaagacaccagaagtggtgtgagtccagatatagggggtggagacaggattgggggttacttggtgggaaatgggaagaattatttcaaccttgggccttgttatttgatggaaatgttttgacttccaggcatcagtcaccgaggtccaaacacaaaaacaaaggcagatccttctgaagcatggtggccttttaactttgtatgattttggatttccagttaactattgcttctattcaagttggtcattgaaaatttactgcgcgaatccaacagcaacccacaacctaaacatccctggctgtcttgttttcacaggtgttggggcgatgtttcctgactgtggtgcaagtccatttccagtttttgactcatgcgttacagaaggtccagccggtggctcactcttgctttgctgaggtcatcgtgccagaaaaaaagaacagcggcagtggcggcggcttatctggcatgggccacacacctgaagtagaggaagctgtgcggtcctggcggggggctgctgaggtaaccctggctttggggagattggtgcctgtgttcaaataggagaggctccagagggcctttgcctgttgattctcaaaacagccatttcatttagaaatgtacattttaaactgttatcattggcttgttcattcatttaacagtgaacatctttgtgaatgcccactttgtgccaggcatgtgccaggcactaggatgacaacctctactcacagcctcctgggagaataggcttacaaaaacagggctaaggggccaggatggagatatgcgggagccagaggaagggagggccctgtctctgaacggtagtgctgcaggaaagcttctaagatgggggaccagtgagaagaggctggcacccaagtcaggaaagacggggtggagctgtctggggagggtaagtggccagccaggcagcgaggcaggcgagcaggagtgtttggcagacggatgggatgacaggctccaaagatacaaccacagcagggcgagagctcagtggacacagggaattttgtgttttttgttagtcaaatcattccctatagaagtgcttggaatctttgtaactttttaaattctttaagtttttctttttctttttcttttttttttttgagacagggtcttgctctgttgcccaggctgaagtgcagtgctgcgatcaagtctcactacagcctgtacctccgggctcaagagatactcccacctcagcctcttccaagtagctgggactacaggctcatgccaccatgtctagcttattattattattattacttttttttttttttttttggtagagatgaagtctcactatgttgtccaggttggtcttgagctactgggctcaagcgatccacccacctctgcctcccaaagtgctgggattacaggcattagccactgcacccagacaagattcttttttttttttttttttttttttgagacggagtctcgctctgtcccccaagctggagtgcagtggcgtgatctcagctcactgcaagctctgcctcccaggttcacgccattctcctgcctcggcctcccgagtagctgggactacaggcgcccgccaccaagcccggctaattttttttttttttttttttttttttgtatttttagtagagacagggtttcatcgtgttagccagggtggtctcaatctcttgacctcgtgatctgcctgccttggcctcccaaagtgctgggattacagatttggacaagattcttaattggtctaactctgcctagatcctcatttgtcagtgctttacatgtgatttcagcagttctccagtatgctttatgtgacttcatgaagtttttttttttgagacggggtctcactctgtcgcccaggctggagtgcagtggcacgatcttggctcactgcaacctccgcctgccgggttcaaacaattctctgcctcagcctcccaagtagctgggattacaggcgcccgccaccatgcccggctaatttttgtattttagccccagctaatttttgtatttttagtagaggcagggtttcaccgtcttggccaggctggtcttgaactcctgaccttgtgatccacccaccttggcctctgaaagtgctgggattacaggcgtgagccactgcactgggccaacatgaagtcttttatcccttggaagatcagctatttcccagcacagcagatatgtttataaaatctagccatcatgcaagagctagactgagtggttggctccctagtggatagagagcgcagtggtgtgggatggtatggcatggtcatcagggataatgtgaaggagaattgtgggattctcctctcgtggtgacaacctcatgactaaatggtgggctgcagggagccgctccggtggggggattctagcctagcgcagggttgctttcctagtcactctggtgtggcattctctattccttttccacagccagaagaatttaagcttaaataaaaggcaatcaaaaacagctctgaaaaagtctgttttaaggagactttgcctataatcagtgacatttcttttgggagacagagtttcgctcttgttgcccaggatggagtataatggcgtgatcttggcttactgcaacctctgcctcccagattcaagccattctcctgcctcagcctcccgagtagctgggattacaggcgcgcaccacgacgcctggctaatttttgtatttttagtagagataaggtttcaccatgttggcctgactggtcttgaactcctgacctcaggtgatccacctgccttgtccttccaaaatgctgggattacaggtgtgagccaccatgcctggccattagtgacatttcttgtaggcattttaatacttatttctttccagtatgagaaataaaaaataaatcttagaagttgagactttaggacttactgctccattttacagagtaaaagataattttcttttttttgagacggagtcttgctccttcgcccaggctggagtgcagtggcgcaatctcggctcactgtaccctctgcctcccgggttcaagcaattctcctgcctcagcctcctcagtagctgggattataggcacccgccaccacgcccagctaatttttgtatttttagtagagatggggtttcgccatgttggccaggatggtctcaaactcctgacctcaggtgatctacctgactcggcctcccaaagtgctgggattacaggtgtgagtcacccacctgggccaaaagataatttttttaaactatcccagcaggcaaacacagattaaaagataatttatggttagcaatatagtgattcattaaataatgtctagttcaaatcattccataattaacttggcaaagtatttcttttctttttttttttttttttttttttttttgaggtggagtctcgctgttgcccaggctggagtgcagtggtgcgatgttggctcactgcaggctccgccccccggggttcacgccattctcctgcctcagcctcccgcgtagctgggactacaggtgcctgccatctcacctggctaattttttgtatttttagtagagacagggtttcactgtgttagccaggatggtctcgatctcctgaccccgtggtctgcccgcctcagcctcccaaagtgctgggattacaggcgtgagccacggcgcccggcctagtatttcattttatgttttggaaattttctttaataaaattttcaaaacatgatttttcacatgttaatattgtccagtctctagttttattatttcaatttcatgccatttgctgcattgttgtcatttctttttaattttcactgttttcttgcatgttttggtctgtctttcatgctaaagacttcctagggctttctttctgttcatcagaaaggccctggaatgctaattggaggctgtgtgtgggggtgggacctgttagctttattgtagatggctaagccctgaggtccagacctgcaccttgttgccttgtcatgtgactttacaaccctcggtgtcctcctggctgctgggccccagcctcctgactgttcagctcacacacgtgaacctaacacctgccttggtcccctgctccatcttctagacaactcatgctgaggaccagcccacaggaggaggcctccgagttctctcttgacgtcttcaccttgaccttttttgccaccattttagtctgtccaggcctttctgccctttctacattccctttgctttcagccagtgatgccaccccctactacactgagcaaatagaatctccctgatggcagcccttcttcctcatgtggccaagccaccaccactcctgccatccctcttcacaaccatcttttcttccttcccctgcctcatgacagcagaggaggtgccctctcctcctgtccaggcttgccccgtgctggccttgcccccatcctcgagggcccagcttctgtggtgcgacctagtgttttctctccctcatcctcagcctgttcccaccagtacacaaagatgcttcccacagaaaagtccactctgccctgccctgtttctctgctcttttctcagccaacttcttggagtagttgtctacctttttttcacctttcattcattctaaaaaattactattttatttttactgcaccttgtggctccttactgctcctggcacaccccgtggacagtttactcagagtagtctaaaaagtaattattattgaagtatttcaggcacatagaacatttcacacccatcagtgtatcttccttttagctgcctgccatatttgctcatgcctgttacatatttttaacagaaaaatatcaccagtgcacttttttttttttttttttgagactgggtcttgctctgttgcccaggctggagtgcggtagtgatcacagcttactgcaatcttgacctcctcggctcaagcaatcctcctgagtagctcagactataggcatgcaccaccatgcttggctaattatttattttattttactttttatttatttttttaaagacagggtcttgctatgttcccaggccggtcccaagctcctaggctcctgcacccggtctgtaaatgcacttgaatcccttttgtacctctccactttcttattcatccctttgtctctagagataacctctgttgaatttgaagcgtgtgatccttgtgcatattttaatattttttccgtatatgaatgtatctatacataaggtattattttacacagtctgaaactttatatacataatgtcattcagcttgctgaaatctggcttccactcctatacaagaacatgccttctcttatcaaggtcattggtgccttcttccatgttttcaaatccagggaaccctttcaacaactttcagcagctcacagcagtgtggagaatattcctccttggaaatactctcagcttgtgacatccaagaaccaacctttctttcctcttgggtcatcctttcttcatctagtttactggcttctccttcctcaacacaatttctgaatgtgagtttctccaggctcagttctagctgcccttctccctaggggttctccatccagtcttgggactgaaaaaccacctgtgtccttggagggggctcaaatgtgtgtgatcagtgagcagcccacttcctgtgggcttcaggcccctgagctcagctgctaccgggggtctcacaggtggctcaggcgtagcctctctccactcacctgttcctccctagaccctctctatgctagtgagtggtgccatcccacactggcttcacttgagaaacctgagatttatccttcagcatttccgtcatgtctacacccagtccaatccttaagaaaacccggcagttcccacctccaaaatcttatcccagatctgtccccttcttccacgtccttcatcgctacccttgttcagggaatcgttacttctcccctccctgtcttgctcgccttcattttaaaattggatgatgtcgcttctcatttccttagggtagcatgtggacccctcagcacgacctgcctagacctgcctagtctggctcctgccttgatggccagccttatcagtggccaccctgccctcgctcactgggctctagttccttggatgtgtctttctttgttaccttggatcctcggcctgtttcacggacccgtctgtaggtcttgacaccccccaccccaccccacacacatgcaattccattcacgaccttctcctctaattctcaccctaagtgctgctttctgggtgtctaggacattccctggtatagtcctctgtttgtttcccgcagtgttttttctccatttataattctgtgttttctttgttcacctttttggccctgaggctctcagctccaggaaggtaaggagcagctttgtgcttcagcacgtacctaacataccaccttgtgagctaaatatttgactgaaagattcttagaaagagtcaaacagttttaaactgtgagactcttaggcttcaggcaatggtgtttacatacagtttgtgaaaccaaagctttggaactttacggcattatagctgctagtcattttcctgtagtctgcaagttttgtaaatattacaactcctacactggcccagcagaacaaaagctaactgctaaaaaatgttacttggttcacagaattgcaacaaaaatagaaatctaaaaacagttcatctggaatcccatctaataaatcaaatatatatttttctgtattctcttcttgtcctgatccatgtatctgttttctgcatttaatcgtaaaatgacagagattagtttctccttttctatcttgcttatctactcttcataaacatatgtagtgactgaataataaatatttacttttctgtgcagatttcaaaagctctgtttttctgttaatatgccaatgtatatttttcctgttatgtattcatgtggtcttttccttcactgaataggaatgccaaccatgtatgttcttcctttttttttttattctggaaactccaagtaccaatattctaggtaacctgtctttttaaagcaggaaagttaaaaatgtctgagtatatacacacatatatatgtgtgtatatacatatatatataacaaataacaagtaggtaagtcttttttccagggttcctaaaataaagggagatttcggccgggctcggtggctcaagccagtaatcccagcacttcgggaggccgaggtgggtggatcacctgaggtcaggagttcgaggccagcctgaccaacatcatgaaaccttgtctctactaaaaatacaaaactcaaccaggcgcagtggtgggtgcctgtaatcccagctactcgggaggctgaggcaggagaatcgcttgaactcgggaggcggaggttgcaatgagctgagatagcgccactacactccagccagggtgacagagtaagaccttgtctcaaaataaaataaaataaaataaaataaaataataaaataaaaaataaagggaaatttcctttctcttcaggatggttaattaggctttcaaaatttgggctgctcactttgcaatacaaacaatctagaacttctagtttatttgcttagatggtttattgctgcattttacttgagggggtttttcttgttgttgttattgttggtctaatgttgctagaactgtaccaccctcttttacctaccagttactatatatgttacaggcgacatctagactaagagaaagaggctgtgatggttgcctggcaggaattgaagttcaacaactcttttgttctcaaagtgcagcaattcctgagcaccagctaaaagaactgaacataaaaatcgacagtgctttgcaagtaagtttttcagaactgacatactgatttccacgggatagaaacaagggagggagttaaagttgtgatgttgaatcaattagaaagggttatagagtagtaattgaccttttaatagctatagaaatttaagatttctatttccattgaactttgtcatcttataatttgctttacgatcttgattgttaaaaataatttatttccaggcatataagatagctctggaaagcttaggacactgtgaatatgcaatgaaagccggcttccacctgaatccaaaggcgattgaagcaagtttgcaggtacacttttccttcctaaagctctggggacctatggcgctgctcctgcagtctagtgtgaaccaagtgttttgacagatgagcgatgggtcacctctcctcttccatccatgccttttccagggctgctgcagcgaggcggaagcccagcagacggggcggaggcagacacccccgcagcccatgcagtgtgagctccccaccgtccctgtgcagataggatcgcacttcctgaagggcgtctcctttaatgagtcggccgccgacaatctgaaacttaagacggtagctttccatggggttccagcaaatgagtgtgaacttgaaaatagagttcttaagagaaatgtaaaggcttgcgaaggatgtagattaaaaaaaaaatggggccgggcgtggtggctcacgcctgtaatcctagcactttgggaggcgggcggatcacctgaggtcaggagtttgagaccagcctgatcaacatggtgaaaccctgtttctgctaaaaataaaaaatcagccgggtacggtggcacgcacctgtagtcccagctgttcgggaagctgaggctggagaattgcttgaacccatgaggtggagatggcagtgagctgagattgcgccattgcactccaacctgggcgacaagcaaaactctgtcttaaaaaaaaaaaaaaaaaattaaaaagcagacctacggagactttaatcagacatttgccaagcaagttttcgttttgttttgttttgtttttttgagacggagttttactctctcgtccaggctagagtacagtggtgtgatctatctcagctcactgcaaccttcacctcctgggttcaagcaatcctcctgcctcaccctcccaagtagctgggactacaagcatgtgccaccaagcctggctaatttttgtatttttagtagagacggggttttactgtgttggccaggatggtgtcgaactcctgacctcagctgatccaccctacttggcctccaaaagtcctgggattacaggcatgagccaccgacctgggcctaggcagttttattcataattttattcagatgtttaacagaaagggtttgaaagtacactataagatattgtttatgattaatgtctctcagtggacttgtatgaattaaataagaagagagatgttgttataatgctgcagtgataacgattatttgtggaacatcatgtgttccagtcattgtgccaggtgctccacatcattgtctcacttaatgctcacccatgaggtaggggtgctgccctttggcccacctgccacatgggaactgatacccaaggtcacacagctagaaagtagaagagctggaatttgagcttatgtaatctgtttccagagcctgaacacctgactacttggtcatccaaaataaaattgagattttaattagtatttacttgtatcagatgattttgtttccctatttggagggattcagaatttcagaattcctcaaccagttcacatcagtagattgctaaataattttgtgctagtatagaaatacctgtgtatattatcgcatatgtatccatatctagtcatttactctatggggctgagaaaatctctgagagtgattgatgataattactaaggaaattaaaatggcataattagggtgtatttaaaatgctcttcttgagccaggcgtggtggctcatgcctgtaatcccagcactttgggaggccgaggtgggcagatcacctgaggtcaggagttcaagaccagcctgggcaacatggcaaaactgcatctgtactaaaaatacaaaaattagctgggtatagtggcaggcacctataatcctagctactcaggaggctgaggcagaagaattgcttgaacccaggaggtggaggttgcagtgagctgagattgtgccagtgcactccagcctaggcaaacagagcaaggctccatctcaaaaaagaaaaaaaaaaaatgctcttttcccaggagttcaagactagcctgggcaacatagcaagactccacgtctacaaaaaatttaaaaattagctgagtgtggtggtgtgcacctacctgtgtggtcccagctactggggaggcttgaagcaggagaatcacataagcctgaggggtctaggctgcagtgagccatgttcgtgccaccggactgcagcttggacgatagaaaaatacataaataaaatgctcttctcttgaggatgattgtataaatgcatttttacaaattttagaaccttgcatggctttgtcttgaggtgtgaactctcttcttatcaatctatagcatacaatgttacagctgatgaaggaggcaggctgctataatggaatcacatccagggatgattttcctgtgactgaagtgctgaaccaggtttgcccttccacatggcgaggtgcctgcaagacggcggtgcagctgctgtttggccaggctggactggtgagtgagcgtgggtggtggatgataggtagaataccaagatgtttcaagcatgtgaggatgtggtgcagacacatgtgtgaaaatattgaataatttaaaaagttatttggtgctgtggaatttagaccaggcaggtagacaaggtaaaggaagagcagcatttaaaaatctctttaaaaagaaaaaccagattgataatatatatttgcagggaacctagttgcaaaatgatgctatgggctttgcttattttaagaaaaaaaccattacagtctgggccccatggctcatgcctgtagtcccagcactttggcaggaggattgcttaagtctaggagtttgaaatcagcctgggcaacatagtgagaccctgcctcttttttttttttttttttttttgtgtgtgtgtgtgtgacagactcttgctctgtcgcccaggctgcagtgcagtggcgcaatctcaactcgccgccttctgggctcaagtgattctcctgcctcagcctcccaagtagctgagatggtaggcacccgccaccacatctggctaattttttttttttttttgagatggagtctcgctgtgttgcacaggctggagtgcagtggcgtgatctcagctcaccacaacctctgcctcccgggttcaaatgattctcctccctcggcttcccgagtagctgggactacaggcacgcaccaccatgcctggctaatttttgtattttttagtagagatggggtttcactgtgttggccaggctggtctcgaactcctgacctcgtgatctgcctgcttaggcatcccaaagtgctggaattacaggcatgagccaccacacccggcccttaaaaaaaaaagaaaaaaacattacattagtaacaagttgacagggccacttgatctagcccctattctggagctacattggatgtctgttgctcaaacatcccatgcttcttcctgtcccaggcctgtgctcttgataccccttttatctgaaaatactcttctctctgattatcatgtaggtcactccttatcttcttggtgttagctccaaaatcacctcctccaagaggcctcccttgaccacagtggtataagtagtacccccatccagtcactgtataccgctgctgtttatctctttcttagcaataaagtaacatcaactaaaaagtaatgatttgttcatttcatctttcagagaaaaaaaaaactttgcccagagttgggtgggtcaggagatcaacatctgaaatcaccatttagctttttgtttgcatcactgacccatagaatcttacgtatttgatctccctttctagtaaacgactacttttcaaaaacatatggtggcagggcgtggtggctcacacctgtaatcccaacactttgggaggccgaggcaggcagatcacctgaggtcaggagttcaagaccagcctggccaatatggcgaaacctcgtctctaaaaatacaaaaattatccaggcgtggtggcgggcacctgtaatcccagctactcgagaggcttaagcacaagaatcacttgaacccaggagtcagaggttgcagtgagccgagattgtgccactgcactccagcctgggtcatagagtaagatccagtctttaaaaaaaaaaaaaaaggatatggcatttcagtcagaggttggaaggacctaattagagattaagaaaattaaagaacttgttttttagtctggttcctactttattcacaaaaagagctattgagggtatactgtcgttttgtttcaagcgggttagggctcaggtggcccagctcacagtggggctgtcttgtggaggctcagatgagggcttgttcacagtaatgagtcacatttcctttgggatcttttcctcagtatagggacctccaaaagaagtagtaaaccagagatgccttgctgaagcgtggaagagcccattggctttagtatatcgatccatattcccagagaccatttagctgaaactgcaaggaccatgccaatgagttcccctgaaaggagtatgcaaaataaggccaaaaggcacaaaggctgttttgagaaaacactgtagattaaaaaaaaaaaaaagttccatgttattcagagagcagaaacttcttcctagttccttgcgtcttgattgtaggacacatttctgtgtgactttaggttatggttctggggatgggaggagagaggaaacacctgtgtggtccaacaatggctattcctttgacaggaagttttttccaaaggtcattgcagatcagctatgggaactctgtttaaaccagtgaaagctggctccattagaagctgaatttggagtatgatacacaactctgtacagttttaccccttctgaaatattacagatttggttttaaaatattttatgattttttaaaacattcttttagttatttgaaaatatattcatcactttgtcaaactctagattacataggatactcttatcacctatctagtattaaagactcttcctggaaataagaggaaatcattcaaagaagggttagttcttcctctgtcctgaagtaattcagtttttattgatggttgaggataagataatctttaaaaaagtttcatccacttctgggcgtgtcatgacaaatgggcttatctgaagcattggtttgacttttttgtttgtttgtttgtttgagatggagtcttggtctgttgctcaggctggagtgcagtggcgcaatctcggctcactgcaacctctgcctcctgggttcaagctattctcctgcctcagcctcctgagtagcttggactgcaggatcaccacacccagctactttttgtatttttagtggagacggggtttcaccatgttggccagggtggtctcaaactcctgacctcaagtgatcacttgcctaaatctcccaaagtgctgggattacaggcgtgagccactgcacccagtctggtttgactttcagtgacacttttacttcttttaagtgcataaagtaaaaaatactaagataaaggacgcaaattaattcctaattaacatatttatagtttggaaaaagtgctagaggtgcttgccagttcaatttaattccatgcccagaatgtggtttctgtttattgaaatgttcttagttttggtcatctgttactacttgctgttgtcttcacggggccctgactggccttggcataactaggctgctaggggaatagttcttagagagtcattttatgtattggattttattctgatttgttttctctctgaaagctggttgttatttgtttttttttttttttttcgatcttaggtggtggttgacacagcacagattgagaataaagaagcctatgccccccagatcagtttagaaggctctagaatcgtggttcaagtcccatccacatggtaacgtgcctcttactttcaccggagcctaagctctgactgacgtttgcacatctttgaaatgatggccttgttttgaacaatgcccatgctagctgacgcaacaagtcttgctgcatgtgcaggtttatgggcagcagtggtatgttagtggcatgtgtcatgattattggtctgtgatgaggaagccaagaggtctgaaaaatggtctcattgaccataatgtaactaaaatgttatatactcttggatcataatgagcagtattatctttgttactgagtctacagcatttaaacatagtatatcattttctctaagtcacccagtgttcactaaagcccagtagagaacatagaattccttctcctctgttccaactacaatcctgatgatcttgagctcatgttgtgacacacccagtgtctttacaaatcttgggacagtcatttttagatattatatttgtaacacttataatagataaaagattattcttaatttatttttttttaaaaaaagctcctacaaatcagaagaaaatgggcaagggacatgaacagctaagtcagaaaagaagacatatgatcaacaaatagattaagaaaatgtaatggccaagtgcggtgactcacacctgtaatcctagcactttgggaggccaaggcgggcagatcgcctgaggtcagaagtttgagaccagcctgcccaatgtggtgaaaccccatctctactaaaaatacaaaaactatccaggcatggtggtgggtgcctgtaattccagctaatcaggaagctgaggcacaagaattgcttgaacccaggaggcggaggttgcagagagctgagattgcactattgcactccagcctgggcaatagagcaaaactatctcaaaaaaaaaaaaaaagaaaaaagaaaatgtataacttcacctaaaaatcagagacaaagtaaagaaaccatatggggccaggtggggtggctcacacctgtaattccagcactttggaaggccgaggcggccagatctcctgaggtcaggagttccagaccagcctggccaacatggtgaaaccctgtctctactaaaagtacaaaaattagccgggcgtggtggcatgcacctataatcccagcttaaggcaggagaaccgcttgagcctgggagacagaggttgcagtgagccgagatcgtgccactgcactccagcctgggtgacagagcgagactccgtctccaagaaaaaaaaaaaaaccgttatgatgtcattttgcccagaatattgttaaattgttttagaataacaatactaaatatagtgacaatactagtttgagccagactgtgaaacaggcaaagaggttgttgagtagagactaaatacaacctttctggagggcaatttagtatattagaagcctaaaataagggatatgacctcaacaattccacagtttcacctctagaaatttatctttgtgatatgtattcacattcagctataaggatgagtatcatagctttattaataaacaggaaaaactaagcatatattggaaggtatttgctattaaaatggtaatctgcatgaatatttagctataagagaaaatatttaaatcatttaagtaggcagagatactaaggaacaaagaggtgctgttggtgcctatgtggactaaaatggtagttgggtaaggcatacaagttgtatttaaaccatttgttcttttttttcgagacagaatctcggtctgtcgcccaggctggagtgcagtggcgcaatctcggctcactgcagcctcttccgcctgggttccagtgattctcctgcctcagcttcctgggtagctgggattacaggcgcatgccactacgcccagctaatttttgtacttttagtagagacagggttttgccatgttggccaggctggtcttgaactcctgacctcaggtgatccacctgcttcggcctcccaaagtgctaggtttacaggcgtgagtcaccgcgcccggctcatttgttcttgaaatgtaagagtataatagtagattctgtcaaaagtgtttagagtctatgaatatatttaagtaaatgttggcagttcactttgtgtcctaaaacctcccttctataagtactctgccaccaaaaagttcttttatttttttaaattattattattattttttttttggtagagacaagatctcatgctgtcccccagactgcagtgcagtggtgtggtcatggcttactgtagccttgaactcctgggctcaagcaatcatcccaccctggcctcccaagtaggcgggactacaggcatgtgccatcatgcctggctaatttttaagttttttgtagagatggagtctcactatattagccaggatggtctgggactcctgggctcaagcgatccccctgccttggcctcccaaagtgctgggattgcaggcgtgagctactgtacctggcccaaaattttaagttaattgtagggtggcatactgtgtcctgaaattaatggtaatttatacacatattttcatttctatcaaacagtaaaccagaggctcactttctgtaagatttttgtgttactaaattctttttttttcttttgtagtcagtgttctgctgaaatgtgttcctgaatttttttttttttttttgagatagtttcgttcttgttgcccacactggagtgcaatggtgttgtctcggctcactgcaacctccacctcctgggttcaaatgattttcctgcctcagcttcctgagtagctgggattacaggcacctgcctgcatgcccagctaataacttttgtgtttttagtagagatgggtttcactatgttggccaggctggtctcaaactcctgacctcgggtaatccacccatcttggcctcccaaagtgctgggattacaggcgtgagccactgcacccaaccctgaattcttaaatttttccaattcaggctgtcattggaaaatgttaaaacttaatcagaattctcattttgaagagtttgaacttttggatagttgggtgaatataaacagtcagtgcaaaaatggctaacacttgagtttgttttgaaaactctccctgtggggttgatttcatttgtaactcattgcacccccgcaaaaaacaccttgtagactgtgatttcttgtagaggtgccctctgctgggtgcttttggtaattttgcaaaattttagttctgtttttttttttttttttcaaattacaaaatactgtatgtgcttgttgggaagaacacaaacagaaatgattgctttactccacctggagaaaaaggatattgctatccatccatgctttgtttcaccaaatatttactgaacacttactgtgtaccagacactgttctgggctctgggaatttaattatgagcaagacacacagggtccctgcccctcataaaccaacttgagaatagagaagggggagacagctgttaagtataagagatgagttcagacacaggcaggcgtatgatggaaatgagaggagagtgccattatatgatagagaataagtaggatagagattcgggggagacttttagacgagtcagtctggaagagggtctgaggatgtgacattggatttgagaggagcctgtcatgcagagagccgatggggaacacacttcaggcagaaagaatgccagtgcagaggcctcaggagtgacccagcatggaaggagatgtgctaggtggtgatgaggatgggaagttgtagacgtcaagacttgcagggcccttgaaggaattgggtttttatctaagaacaggtagagggttttaggcaagtcttggtgatttgtcaacagaatgggtttagccacttaagggcattttattgatcagctcaaggctgatgaataaaataaaaatgccagtttgttgattgttgatttttcagaaagattaattatcatcaccaggagctgtagtactcttttctacatggccaacaaatgctctcctagtgggcaaacatgtgacaagccaagtcacaaccagacttggcttgggaacaagagcaaatgtgtcctgattatcagtgattccagatggagagaattgggtgcactgaaccttgggcaggctcagctgccaagattctctctgaggagtccaaggtctagctgggcactagcagagcttgcgttgttgttcaccctttccaggcttctgagcctggccggctctcatttcattctctgatatatttcttcccaagtcaaagtcatgttagggagtactgctacctccttgagtgactttgtaagtgttgagttcaccatttagcttccagagtgcccaggatctggcagacatcatcttcctagtagacctatgctgctcagactgttttccctctcagaaaagggctcttggccagaccaagtggctcacacccgtaatcctagcactttgggaggctgaggcaggaggatcacctgagctcaggagtttaggaccagcctgggcaacatagcgagaccccatctctacaaaaaaattaaaacattagccaggtgcggtggcacacgcctgtagttccagctacttaggaggctgacatgggaagatcgcttgagcccaggaggtcgaggataacagtgagctttgatcacaccactgcactccagccttgaggatagagtaggactctgtctcgaaaaaaggttggggggctcttggtgtaggtaccctgaatggacggtggagacccaaatgatgagaagcagttggccataccaaaatctcaggaaagagaaattcgggcaaaggcagcagcaagagcaaaggtcctgaggtgtggacaaacccatccagggaggaagagaaggcctcacagctgggacaaggttgaggggctgggcacagagggctttgagggctgtggtgagggtttagattttatttcaatcacgatgatatcccattgaagagttttaagcaggggagtgatgtgctctgattggcactacaggaagctcactctggcccctatatgaaggatgggctttggaggtacaggagtagagaaaaagaggccaggtgagagcttggtcctgagacccaggagtggtggtttcctgaagcagggggttcataaacaaggtggcgagaagtgcttagattctggatgtgttttataagaagagctgtcaggattcactgatggattgcatgcaagatgtgagggaactagagagggtgtgtaagttttggggtagacagttgtgttgttcacttattggagaagtcggcaggaatcagagtgtctgagctagcacagaccgcacaggttaagggctcagccccacaaggctactccccacttcagatgccatccacaagtcccaggttgtcacccgacttctaaccaatcggctataagttgggggttcccaaaacctccaggtttgatattttgctataatggctcacagaactcagtaaaacatttaattatatttaaggtttattataaaggatattatagcagatacagattaacagccaggtgaagaggtgcatagcgtgaagtgtttgggatggggctccaagcctccatgcccttgccagctatgccctgtgcccagcaccttagtgtgttcaccagcgtggaagctctcagaacccgatggtctgatgatttttatggaggcttcatcatataagcaagtcatcttattagaacaaaagacactatcacctaggaaatctcaagggttttaggagctctgtatcaggaactggaggcagagaccaaatatatattctgatatcatgagacctcagacctttttgcttcctactcctcttgtggggcagtgagttccaggatcagccctgttgttctctccatgttcttacagttactgaatttttgctgggcgccagaggtacataaaagttgtagccttttctatgagacctgcttgagacacctttgcagagaaatgcagccaagactaatgcagcctaatctatgcctaggtgcctgaaagaagaccctgctaccatgtccctgctgcagagaagccttgatcctgagaagaccctgggtctagtggacgtgctctacacagctgtgctggacctaaaccgctggagggctggaaggttggtgtctgtggtttgcattagatgcataccgagggacagtgtgactatgcacagtttcatgtgtgcttgtgtcattgatagtatacggtattgtaaagaaggcagtaaggactttttagtaacttttattttcagaataatttaaaacctgcagcaaagtggcaagaataatacaaagaactgctccatgccctgtaccagattcccctatttgctaacttttttgccttcctttattttgtcatttgagaggaagtccatcaagaggacttttaactcaactcatattctccttatgaattaagaacagagaaatgtttagaaaatttgcttatgtcttttagaattttttttctttttcaatcagttctctcaggttgaacttgagaaatgtgtatacatctggtagtggccttaaacatctagccatggcccctctccctttttcttttcttttcttttcttttcttttcttttctgtcttggtctttgtctttggtcttgtcatcttgtctttttaggatctggctctgttgcccagccaggctggagtgtagtggtacaatctcagctcactgcaatattgctctccatccatgctatccatcccatccatcccccagctcctgggctcaagtcatcctcctacctcagccttccgagtagctgggattacaggtgtacgcccagctaatttttgtatttttcatgaagatggggtttcgctgtgttggccaggctggtatcaaactcctgacctcaagtgcctgcctcggcctcccaaagtgctgggattacaggcgtgagccaccatgcccaaccttttctccctttcttaactcatgagtacacaaaggccagaatagtgaagtgacttttccagggtcacacagccttcacctgcctcagctcctgccccatgccctttcgctctttagggctccattttagtatgggaaaaatgtgctcaggaaactttgaaagtcacagccatctgttgggacaacgttggcacatagtatccctgcatccccccaccacctccctctgctttgtggagttgtccattgtccctctgctgcatttgcgtggctgtagcccctgtcctccaggcacaaatctagcttctgcaagttgcatccccacatctagccatgctttcccctcctgtgccaccattagaggatttcactgaatcacactcctcaggccagaatcctagcagaacttccagtcctgcgttagacactgtagatttcatactctccaaacccctgggtgttcatttatatataaaataagtgaacccgataccaacctgagaggtttttcttgctctcaacgccattcttaaatacaaagaggtccattttattattttatatatttgtcttttttttttttaaacaaatttctgtttaaatagggagcaagctttaccctgcatacagatccagctgcaaagggagatctgtgattttggcaaccaggctgacctgccttctggaaatggaaacaaatcttcaggtggcctgcagaagacattctccaaactgacatcccggttcaccaagaaagcttcatgtaccagctccagcagcagcacaaattattccatccaaaataccccttccaaaaacatcttcatagctggatgttccgaagagaaggccaaaatgcctggcaatattgatacaaggttacaaagcattttgaacattggtaatttccccaggactacagacccttcacagtcagctcagaattccagtaatacagtggccaatggctttctcatggagaggcgtgagaacttcctgcatggagatgacggcaaggatgagaagggtatgaacttaccaactgatcaggaaatgcaagaggtgatagattttctctcgggctttaacatgggccagtcacatcagggctctccgttggtgacaaggcataattctgctgccacagccatggtgactgagcagaaggcaggagccatgcaaccacagcagccgtcactgcctgtgccccctccaccacgggcaccccaggctggggcacacacacctctgacaccccagccgggactggcacctcagcagcagtccccaaagcagcaacaacctcaagtccaatactaccaacacctactccagcccattggaccgcagcagcccccgccccagcctcgggcacctgggaaatgggtacatggctcatcccagcagccagcgcaggctgttggagcaggtctgtctcctcttggtcagtggcctggcatatctgatctcagttctgacttgtacagcttgggtctggtgagcagctatatggataatgtgatgtcagaggttctgggacagaagccgcagggacctagaaataacacctggcccaaccgtgaccaaagtgatggagtctttggaatgctgggagagattctgccttttgatcctgcaggtatgtgaggcctcccatccctcgcccagtgtcaacagcaaatgcaactgccgaggtcttcccagggcctgtctgctgcagccttacttgtgaaggtgaaatcatttaatccccctttacgaccctttctcactgtggaggcaagtatggggcagatctaccaagatgggaaacagtggtgagaaaggggctgagaacatgagtggactatttttcttactttatagagaacagaactgaggctaagagaggttacttgaacagctcaaagtcccatagttcaagtaggctccagtctaggcctgcctactcccggcagccaaggtcagcagccctttgtggggtgcttttttcctgattatataacctgttctttgcgatgctttttttttttgcctaaactctaggacctatgacaggtgacagacaccctcctgccttcatagaatacagcttctcctgggctagacaatgaaaataccaccagagtcatcttaaaaaattagagaaggaatttacaaacaagaacaaactaggaggaggaattaagggggaaaagccaaaaataagtaaattagaaagaaaaatagagtagaaattgcaaataactctaaaggatctttggaagaccaataaaatgtataagccaatttattctaagcttgattaagggagaacaaagagaaacaaaattaggaaatagaaaggatacattaaaagcgctttagtggctcatgcctgtaatcccagtactttgagaggctaaggctggaggatcacttgaggccaggagttcgagaccagcctggtcaacatcacaaaaccctcatctctactaaaaattaaacaaaattagctgggtgtggtggtgcttaggaagctgaggcggtaggatcccttgaccccaggattttgaggctgcagtgagctatgatcatgccactacaccccagcctggctgacagagagaaaccctgtctcaaaaaaaagccactttaagacagtaccatctaagacttaatagcaatacatttggaaattcagcagaaaatggattctttcctagcaaaataggcattacaaaattataccaagaagtggaaaacctggccaggcatgatgtctcatgcctgtaatttccagcactttggaaggctgaggtaggcagattgcctgaggccaggagttcaagaccagtttggccaacatagtgaaacccccatctctacaaaaaataaaaaattagctgggtgtggtggcacatgcctgtagtcccagctccttgggaggctgaggtgggaagatcgcttgagctcaggaggttgaggctgcagtgagccatgatcacaccacagcagcccagcctgggcaacaaagtaagactctgtctctaaaaaataagtaaatacataaaaaataaaaaagactatctactaaaagctaatagcaaatagtgccttatataatgaaacaaaaatcatttcagttaatatcaggaatcagacaagggcgactgttatcacctgtagcatgtaactttgtcttggacttcacagcaaatgcagcaagacaaaaagcaataaaataagtggtctaagctttggaaaatgataaattaagcagcacatctttttgctgataatagaattgaaccccccccacaaaaaaaaccatctaaaattagtaagagaatttggtaacataggtacatgcaaacttttttctctaatttagcaaaaggcatacacagaagtagaaaatgtatttcattcacaggggagtactgtgaaatgttacaaataagtatagcaaatacttgtacaagtaaatcaccaccataagaggacactccaggccgggcgctgtggctcacgcctgtaatcccagcactttgggaggccgaggcgggcggatcacgaggtcaggagatcgagaccatcccggctaaaacggtgaaaccccgtctctactaaaaatacaaaaaaattagccgggcgtagtggcgggcgcctgtagtcccagctacttgggaggctgaggcaggagaatggcgtgaacccgggaggcggagcttgcagtgagccgagatcccgccactgcactccagcctgggcgacagagcgagactccgtctcaaaaaaaaaaaaaaaagaggacactccttgctgaaacacccagcatttgttacaggagggaagttaatgctggggttaacactcctttctctttttttttgagacagagtctcacgttgttgcccaggctggagcgcagtggcgcgatccccacttacttgcaacctctgcctcctgggctcaaatgattctcctgcctcagcttcctgagtagctgggactacaggtgcctgccaccacacccagctaatttttttttttttttatacggagtctcgctctaccgccccgaggctggagtgcagtggcgcgatctcggctcaccgcaagctccgcctcccgagttcacgccattctcctgcctcagcctcctgagtagctaggactacaggcgcacgctaccatgcccaactaattttttgtatttttcatagagacggggtttcactgtgttaggcaggatggtctctatctcctgacctcgtgatccgcccacctcggcctcccaaagtgctgggattacaggcatgagccaccgcgcccatagagatggggttttgccatgttggccaggctggtcttgacctcctgacctcaggtgatccacccacctcagcctcctaaagtgctgggattacaggcatgagccactgcatctgaccattgctcatgtcttctgaaaattcttcatgccgctgctcttgctgttttgtgcttgctccccttgggtggatggatgtaggaaacccttgtgcctgcaaccctgggccacaagaagggtaaacacctccatcctgctaagaaacagcaagcccactggctgccacccactggtgtgggcacagtgcgttttctcagttgatcatagatggtgtgtacattttttgactgtcatataactaaatccagagtataaacagtatttgtcagaattgtgtcatatttgaggccgggtgcagtggctcatgcctgtagtctcagcactttgagaggctgaggccagcggattgcttgaggccaggagttcaagaccagcctggccaacatggcgaaaccccgtctctaccaaaaatacaaaaaaattagccaggtgtggtggcacacacctgtagtcccaaccacttgggaggctgaggcacgagaattacttgaacccaggaggcagaggttgcagtgagctgagatcacgccactgcactccggcttggataacagagtgagactttgtctaaaaaaagatttatttttaataaatgaataagaatgttatcatatttgacctctgagtcctggatacctcttctgtctgtagactacaaatcctactctttcccttctgggtgttcctttctgcacctgaagtccatggtgtagttttctacagaccttgccccgagggcataagatctgcatagcccttgatgcagattaaggaggggcacccctctggacagaatcagagggcgccatctagtggccccgtctagataggcaaaatcagtgcgggatggggaacgggagacaggccagcatgactgaaatcatcttgtgacagtgccctaaggataagttgataatgggattgtgccctagtatcttccctaattttaagctaaaaaatgcattgctgagtcacatttgatttatgatgcatggatgctttcctgccatatgttttttttgacactttctgtaaacgccatctgtgcttttctcccatttgtactgccctgtatatccccgttcagcattgccagtgtttccagccacctcttaaagcattctgaagtttcattttattctttgccacacttaagatgttcagatggaatgagcaaatctcctgtcaatagccaggaaaatactagatcaaactttagcttaagtgggatcagcatataacctctatctggctgaccccaatgctttgatgctttgttaacgttcaggttatcagttggccaaagtcatcatctgattttcgaagttgttagctaatgactctaggctacatacagagcaccaagacaatggactttttttgagttggagttttgctcttgtcacccaggccggagtgcaatagcgcgatcttggctccctgcaacctccgcctcccaggttcaagtgattctcctgtctcagcctcctgagtagcttggattacaggtgcctgccactacgtccagctaatttttggtatttttagtagagacggggtttcaccatgttggcctggctggtctcgaactcctgacctcaggtaatccacctgccttggcctcccaaagtgctgggattacaggtgtgagccaccaagcccagcccagttttgttttgttttgtttttaaagacagggtctagctctgtctctcaggctggagtgcagtggcgcaatcttggctcactgcaacctccacttcctgggcccaagtgatccccccacctcagcctcccaagtagctgtgactacgggtgcacaccaccacacccaactaattttttttttttttttgagacagagtctcactctttcgcccagactggagtgcagtggcacgatctcagctcactgcgacctctgccgcctgggttcaagtgattgtcctgcctcagcttcccgagtagctgggattacaggcgcctgccaccgaacccagctaatttttgtatttttagtagtggtgacagggtttcaccatcttggtcagactggtcttgaactcttgacctcgtgatccacccacctcagcctcccaaagtgctgggattacaggcgtgagccaccgcgcctggcccacacccagctaatttttgtagagatgaggttttgccgtgttggccaggctagtctcgaacttctgggctcaagcgatctgcccacctcaggctcccaaaatgctaggattacaggagtgagccactgtgcctggctgatgctggaaattttttaagtaattagtatttgtctttaaaatctagtcgtagggaaatcaaaccatttttctctctttttgtttctttcacacttagcctgcctctatcctaggcatagcccttcatgacagccctggcacacaccatgcctcagccctaggtgcggcaagtcccatctccccacagcagggtgctgggcacagcctacagcccacgctgtggggcacaagcctggcagctcctcactgcctttcattgcatgtgtgaccagcacgttagcaaagcgtagggaaggaccaagaggccagtttgtccccaaacccggtttattcctttgtcccaatgcagtgggctcagacccagagtttgcacgctatgtggcaggagtgagccaggcgatgcagcagaagcggcaggcccagcacggtcgccggccaggcaacccccggggcaactggccgcctatggatgacgcgcatcggacctggcccttccccgagttcttcacagaagggtgagtgctgggtacttcagggaatctgagcttgagacccaggtgtcccccgaggggcctgtgagaagagaggctccttgcctgtgtgcattcttttcaggcagttcaattccaagcccccatgtgagagagtgacatgggatgaaatctttaggggtcagagtcatgtggctgactgttagatgccaagtagtgtgatgtatccctgtgaacgtgccattggtatacattcatgattttcaaaacagactcttcagccctagacaaggctcttacatgatggtgcttgtgaggtgaaggcatgtttcacacggcctttatactgaactgagtgtggctgcgaagcccacgtgatttatggaacgctgtcattatagcctatgaaaagcaaaagtgtacaattgagattctagtatattgagagaattgcaaatttttattgtaaagacaactggggatttttttatatcccatattgctacatggttaataaatctggatgactaaagaccagctcaactttttgttttttcttatttttaaatttttttttttacttaaaaattttttttctttcaacttttaagttcaggggtacatgtgcaggatgtgcaggtttgttgcaaaggttaatgtgtgccatggtggtttgctgcacagatcatcccgtcacctaggtattaagcccagcatccattagctattcttccccatgctctccctcccttgctttttctaaaacaaatttcatatacaaaccataggcttcttagaggaataaagggaattgatgaatatgtattacttttgaaataaggcaaaggaggaaaacctcacgttttaagaagggagagacaagagaccactatttggttatgggatgaatgcagggtaaggactgccctttcagggtggggtggcgggtggtggggctgcaggaggccctggcccagcttctctctctggctttcagggatggcctgcacggtggctggtcgggtgctcagggagactctgccagctcgagtgatgagacatcctcagccaacggggacagcttgttctccatgttttcagggcctgacctcgttgctgctgtcaagcagagaaggtatgaagggatttctaaaccaaggtggggagagaagggcatgtgaatgcaacccatggctcactccctgggaaagccaggagcccagtcacctccagtctccctgtgtgagaggaggggctcttccagcaatgcctggctgaagcctctgaagagcacctgcaggaggcggtttccacaaggaagagccggcctcatcttgtgcagatcaatttgggagacggggtggccggtgctggtctgtgccttgcaggaggcacccatttctgtgggaagagcaggcctttggttgcgagttctaatctggactcaccaacaggctctgcaaccctagacaaggggctggccctcaattaccctccatctctttattaaagatggataaaatgacctctgaatggcgtttcaaagttgggaaaagtagtaattagctttcaaaagtagtcacaaaaattaaaatgggctctgaactgagaggagagcttggttagaaataagtagagaaactgctgtggatatgagaaagcaaggtcagggtggcagactaaggaccatgggcaggagtagagggcacgcagggctcccaggcactcgaagccatgctgtagagcagagtgggaggccgggttacttggtccctgctggacaggccaggctctgtcagataggcagtggggagcgggtaggtgaagacagaatggtacttgcacagaatagtagtggggtggggggtggcattgaccaatcacgagcacacattcagatgctttctgtccacacttgtagtcccagctactcgggaggctgaggtgggaggatcacttgagcctgggaagttgaggctacagtgagctgtgtttgtgccactgcactctagcctgggcaacagagttagaccctgtctcaaaaatcaaacaaaaaatcatgtcaggttaggctaggtgctctgaaggaaaataaagcagggtatgagggtagtaaatgcagagaacaggtggatgttctatttccagcacttagtcaatgaggcttctgatgagcagagagctgaacaaagtgcggcagcaactggtggggaatcggcagtggggtgtgggtgaggtaggaagagtcaaggatgacacgcaagttttctgcctgagtttctgtgaagggcgccatgaactgaggtgctaagcctgcaggaggagcaagtttgaaccgggggtggagtttgagacttttctttcagacatatgactgattcgacttctaagaagtcacatctggcaccatctctgcagagactgttgtctgcatgcaggagtgctggctctgatctggccacatcctgcctttttcattcaaccttgtaacagactttcatgtgattagtaaaacgaatgggctttaagtcacatatccttagtgcttggaaacagtatctctctctttttttgtttttttgagacggagtctcgctctgttgcccaggctggagtgcagtggcgcggtcttagctcactgcaagctccgccttccgggttcacgccattctcctgcctcagcctcccaagtagctgggactacaggcgcccaccaccatgcccggctaattttttgtatttttagtagagacagggtttcaccatgttagccaggatggtcttgatctcctgacctcgtgatccacctacctcggcctcccaaagtgttgggattaaaggcgtgagccaccgcacccggccggaaacagtatctcttaaataaattaacaaaaagccggccggactcggtggctcacacctgcaatcccagtactttgggaggcttaggcgggcagatcacctgaggtcaggagttcgagatcagcctggccaacatggtgaaaccccatctctactaaaaatacaaaaattagctgggcatggtggcacgcacctgtaatcccagctactcgggacgctgaggcacaagaattgcttgaacctgggatgcagagtttgcaatgagctgagatcatgccactgcactccagcctgggaaacagtgagactcagtctcaaaaaaaaaaaaaaaaataaaataataataataataataataaagccaaagaaggtggactcagcagctgagtaaaccagtgcctgtctttgcctgccacctccacccccagctcctccacctgcactggcagtgcaggagcgccgtcattcactgctggctccccttagccgcctttatgccattgacccaggcaggcctcctcccctcctagaaccagggcctggagatgctggagcctagcactagtgtgtaccctacaggtgggctgggcaggaagccaagcaatcactgccctgagctcttggttcttgcaggaaacacagcagtggagagcaagacaccagcacgctgccctcaccacctctcctcaccacggtggaggatgtgaaccaggtattcaggcaggctctgtgggcacagacttgggctagcttccacagctgcagttttcagagggcctcaaagtaatgagggatcttctttgtggtgattaattttgtgtaaatgattagccacctcagctgactcagagccacaggaagctctacggctgtgctgtccagtgtgatagccattcaccacatgtggctatgtaaatttaaatacaaataaaaattcaggccgggtgtggtggctgatgcctgtaatcccagtgctttgggaggccaaggcagaaggatggcttgaggccaggagttcttgaccagcccaggtaatatagacactgtctctgcaaaaaaattaaaagatcagctaggcatggtggcacatgcctgtagtcctagctgcccaggaggctgaggcaggaggatggcttgaacccaggaatttgagattacagtaagctatgattgcaccattgcactccagcctgggtgacagagcgagactgcctctaaaatactttttaaaaacaatcagccgggcgcagtggcgacgcctgtaatcccagcactttgggaggccaaggcgggtggatcacgaacgaggtcaggagatcgagactatcctggctaacacggtgaaatcccatctctactaaaaatacaaaaattagccaggcatggtggcatgcgcttgtaatccgagctactcagaaggctgagacaggagaatcgcttgaaccccggaggcagaggttgcagtgagccgagatcgtaccactgcactccagcctgggcgagagacagactgcatctcaaaaaaaaaaaaaaaaagttcctttcctcagtttgcactagtcacatgtggcgagtggctaccatactagaccgtataggcacagaacatggctatcattgcaagaagttctgttggacaggggtgtgggagtgagtggggctctcacccggcttcctaggagggaataagggccaggcatctggggaggtgggaaatgatgatacattgcccgaaatgccactaagaactctcttttgtttctcaggataacaaaaccaaaacgtggccacccaaagcaccctggcagcacccttccccgcttcccagcacgctgcccagccccagcgcaccactctatgcagtcaccagccctggcagccagtggaacgacaccatgcagatgctgcagtccccagtgtgggccgcaaccaacgactgcagtgccgctgccttctcctatgtgcagaccccaccccagcccccacccccaccagcacacaaggcagcacccaagggcttcaaggccttccctgggaagggtgagcgcaggccagcctatctgccccagtactgaccccaggccagccagcctgcctgcctgcctgcctgcccgcccagagctgtggggatgagtgtccccaccccagggccacttagctgacaccagcccctcagaggaccagtgcgccccatcccagggagggttccttggggacaagggtggttggcagctccaagcctttaaacctggcttctgaaacgatggcatcagagccctggagagccagctggagacacaggcgtctggccttcaggggcttgctagggaacctgcatgcctagtaagcgccacaggtgactctgatgcaggcgccacagccacacttgaagaaacacagctcttgggtttttagtcctgctgtgtgttgggaagacatcaggcctgaaagctgagggcataactgaccattttttggaaaccctctcctccctcctccacaccttgagtgatgaccacaccaatcactgtattttatagctttttttttcatgtaggtttttagttaaaacatctcctgcctaaaatgcattgaatattttaagataacagatatactggctggaggtttgtttaacactatctatatttaagcttatacaaaatgggcaaaatatagaatatttgtgattggaagcagtcacctggggtttctgggggtggacagttcctcgccacccagcagcaccctgggactgcggcctttcccagctttattgaagcagaatggtggaacttgtgccggaggtacactgctgaaggtgcgtggcggtggaccagccagctgctgtccatgtgcagagcaaggctgcacctgctgcccttcgatccttccacacatggccaggacactgccacaatcctcggggtgtggtcaaggggcactcagagacacctgcactagaaattgcattgacattgtgagctggctcagaagacaaaccaattaagatgtagatagaaattaatttaaggtcttttcttaaaaaaaaaatccacctcattttcagttaacatgtgccattaaatagataacatcctgtggatttagggatattttccagccagaatggatccagaagaattgaatggtgcttaaattgagaaataataataaatatatctatatagaatagacatatcccactgtatattaattgaggttacagaaagttctttatataaaacttatttaaatttttcatatttcatctttgaaaaagtctgagaaaaatccataatattttctggtatgaaagtttgacagtattaatattttttttatattttcttaaatcattaaaccattttaatatatgttaactactaataaatggtttattctttctaactccatataagcttttccagcaaagattgtaataacacatttatgttctcgtttttctacagatataagtaaatttatatataaaaataccaaaaagaggctgggcgtggtggctcacgcctgtaatcccagcactttgggaggccgaggcaggtggatcacctaaggtcaggagttcgagaccagcctggccaatatggtgaaaccccatctctactaaaaatacaaaaattagccgggtgtggtggcgtgcgcctgtagtcccagctactcgggaggctgaagcagaagaatcgcttgaacccgggaggcggaggttacagtgagctgagattgtgccactgcactccagcctgggtgacagagtgagattccgtctcaacaagaaaaaaaaaaaagaatatatatatatgtatgtatgtatgtatgtaaacacacacactaatttgagaggacccgtagggtgtctgagcccagccacctgagtttttagtactgtgttgtcaggctcttcccaggcctcaggtgttgtcttttgtgctgtgtggggatgcattgctgcctgtatttatgatcttttgccgtggttctgagcattcacctcaccatgtttacaaagaactgttttgtatatagacattttcaggcacgtgctttgcaccaaccctgcgtggctcttgtctgtgttagctgtcacggtgtgcacactaatctctgttaaagttgtctatggctgttctacttgtaagatagttttctatttccttcagtaatgtgtccacagtaccctgtatttcgagttccattatactgaagtactcatgttttaatagtgcctctccaaaggcctcaccttggacagaggtcaatccttgatgctccagcacaggtgacgtcactaattgtcactttccagtttgtttttctctattaaggaagacattttctaattgcatctccatgggctgtgagactgtgtgaagccgtttgtgtggtctccatgtaggtgctgtgttcccggcaccgccttgctctgaacactggtaattccaggtgctgcgcttggcagaggggtctcgccaaagcgcatgtgtgtgcatgtgtgaacgtgtgtgtcctttgcatggttgggcgtgggtgccttgctagggcatcagcaggacattgtgtgtatagttacaatgcttccaaactggaactctacattttgtatcttttaaagctcctataagtaaaataactattggctttattaaaaatatacatttaataatactttgtatccttgtttaaaatgaactgcagaggacattatgtcaaaagccctgcctgactcattgctttgaaaagctgcatactgagttggtttttaggtcagcctgtcctctgattctagcaaggggaagaccacttgggatattacggtgagctgaagtggatgggcaggagggagaacaagcagctacgcctcccctattggcttccctaaggcccaagctggtttaggcccctgtgcagggggagccagtgcagtagtgaaggagacgtcctctgcaagggtgcaagctctctgggttggggtctaccaacacccatgttccaccaaatgtggatgctgtgacttgcccagccagcttgtccaatgacgagacccaagaatgagggcttgttttaccctcttcccaaaccagggacccaatctatggcagagatactgtgccttacagggataagaaggacctgtctctgccggccgcagtggctcacacctgtaatcccagaactgtaggtggctgaggcaggtggaccacaaggccgggagatcgagaccatcctggccaacatggtgaaaccccatctctactaagaatacaaaaattagtcgggcatggtggcgtgtgcctgtaatcccagctactcaggaggcttaggcagaagaatcgcttgaaccaggaagtcagaggttgcagtgagccgagatcgcaccactgcactccagcctggcgacagaacgatggggctgtctccaaaaaaaaaaaaaagccaggcactgtggctcacgcctataatcccaccactttgagaggctgagacagtagatcatgaggtcaggagttcaagaccagcctgcccaacatggcgaaaccccatctctactaaaaatacaaaaaattaggtggtatggtcgcaggtacctgtaatcccagctgcttggaaggctgaggcaggagaactgcttgcacccgggaggcagaggttgcagtgagccaagactgctccactgcactccagcctgggcaacagagtgagactctgtctcaaaaaagaaaaagaaaaaaagaaaaaaacaaaaacaggacctgtctcactggatgatgccatcgtgttaagcagaagaaagatagtatcatgagacccacaaatggagggcaggtcacaggagcatttcagctcattttcatttacagaaagacagcacctcagtggaaccttttttgacgacctgaagaaaatggagtaatgtgggcattaatatataagctgctggtgtaggaaccactcttctttctgccaaggtgccctgaagttgagcatggggaccaagtcccagagccttccaaatgcacctcaggacaaagttgctcggtaacggccatgttgcctgagagtgctcaagaatacactggaagttcatattaaaaagctagcaggggctgggtgtgctggctcacgcctgtaatcccagcaatttgggaggctgacctgggaggattgcttgaggccaggagttcaagaccagcctgggcaacatagtgagaccccatctctttaaaaaagcccatattttattccagagtgttcccatttaacacaagcacccagttctcttgactagttctgattcacagcagtgctggaggccagagggcagaagtcccgcagctctggctgtgtgcaaatgagtggggagggaagctgagcagatgctacacctgagctactactgcaagggcttcacaggccttggcccatctgagaaatgggggaggatgcgcaggcatcttgaggtacttgggaggcttgtgaccttcctctcccacctgggggctccttggatagggggcttccagtttggaggctgagatgctgcatgccaaccatgcggctgtgaggggatggccttttgtgcactgtgtggccactgctgtgacctgcctcctgttgtggagacaggaaataaaccttcccaatgatcagcttctctactgcccaaaagcatgtatgtggacagcatgactggctacctcccagcgacaggtacccaggagtctgaggcacctccaagggtagactctggaaataacacatgcacctagccttacagcacaggggtgagctcctgggcccaggcctgtgtgtgtcagtgaggggactggatgtggcttgtactggaatattgacttggagatgtgggcctaggtgagggagaaggattgtttcaggcgtgtcacattcatttcaacattcacgaatgtcatataagggctaggcccttgctaggagccaggactgcaaagatacagtccctgcctttaaaactcagtattttaggggagacaacccatctttcccatccttgataagagaaccaccatccaccagcaacccagttgctcaggctgaaatcccagaagatattcttcgttcttttatttcctcattcaactaatcagcaagtcctataagtgtattcccaagcacactcaaattccaccatgttctggccaggcgcggtggctcacgcctgtaatcccagcactttgggaagctgaggcgggcggatcacccgcggtcaggagttcgagactagcctgaccaacatggtgaaaacccatctctactaaaaaatacaaaaattagctgggcatggtggcaggtgcctataatcccagagaatcgcttgaacctgggaggcggaagttgcagtgagttgagatctcaccattgcactccaccctgggggacagagcaagactccgtctcaaaaacaaaaaaattccaccatgttcttacatctccactgccatctacctggacttcacctggctcctgcctctccccccacagcctcagggtttcccatgcaccctcccctacttccaagtagccttgccgtgtgtcctccaacttgcctgttgctcccaaggctgcttgggcctctccatcggttttctggggtcagagcccatcttccagcctgtcttcgtttctcatgatagcactcagcactcttctggaattttgtgtttgcatttgtgtctcactggaatgaaggccccatgagagcaaggagcgagtcttgttcatggccacatgtgcaaggtgcaggacagctcctgtgaccaccacagtgcaacttgagacagatgaaaggacgagttgctggggccagaacttacgaattctaatactgagcaaaaagacagaactagaggccgggtgcggtggctcacgcctgtaatcccagcactgtgggaggatcacttgagcccaggagttcaaggctgcagtgagtcgagatcttgacactgcactccagcctgggtaatatagcgagactgtctctaaaaacgaaaaacaaaaacaaccagacgaaaacattctcgcgttgggctaaaagaatactattaaatacatcatctgggctgttccaggactgggaggggattagcactacggtggagctgcggataggcccaagcaggcctcaaataaatgtaaagctttttattctcgtggaaacagctatgtacaatggggaaaatgtttttaagcatctagcaaaggattcacggggctctggtaatgaagccccgaaacgacaagactggatcgcgcagggtagggccaacaccagggacaaacccccggcctcttgggggcgcggtgagtaggtggcctctccaagcaccactcccgatgtgcgcatgagcgcagccgcccctacgcagcgcgtgcgcacgtgcactcaccacgtccatcccagacgtgcggacccgggtgtctgcaaggttcagtctccacaccccagcgcccgaccctgcgcggggacatgcgcacaagcgcgcgtcctgaccacccggacgtgctggcccacacgcacacgcgtgcgcattacccccgccccatccgcgcctgcgctcaaccccgcctacacctgctccgtggcctccccggaggcgatgagccaaccccggtagctccagaggcgtggtcccctcgccttcgccggtcaacatgactcagcatcctcggtgggctcgcctcctcccccggaacagctgtctaaaatccatgggcgtggaaacgccacgccacgccccgctcccgacttcttcagctcaggccccagaactgaccaccccaccagtcctctgccccagtccctctgccttcactcccatggccacctgtgctccagggcctgcctgacccctgtccagcggccctgaagtaaggtctgtgatgtctaaatgccgatacctcagtttccccatctttagaacggggctcttgtttggaactgtgcccgccacagcctgcagtaagtgctagcttcatcaatactcagtggcagtcaattgcttttccagggctgccttatgcttgaaattaaatctttgctatccagagttaggactgtccccggacttcctaacttgcctctgctgtcaggtgtaccctctggtccgctcctctctcagggccacatcatcttgctgggggcacgtgaaggtgtccggctctgcagcatgttctcttggaatttctgggctaggtttcctttcgattctccttggtcagtccctggcctgggggcatgacccctcccagcttcactaccccccaggatcctggggattctgagccctaagctctgcgatcggcaggacttggctcagcatatggtagtgattgtactgatggtgatagacaacagaatataaaatgaccttatggccaggcacagtgacgcatacctgtaatcccaacagtttgggaggctgaggcaggaagatctcttgaagccaggaatttgagaccagcctgggcaacacagtgcaactcagtctctacaaataataataataagaaaattagccgggacggggtggtcatgcctgtagttctagctactcaggagaccgaggtgagagaatcgcttgagcccagagttcaaggctgcagtgagctatggtcatgccaccgcactccagcctgggtgacagagcgagacactgtttcaactaataagacataactgggatgatgaggagtggagaaagggattgcctgctcctccactttccctccacctttttcctaggactgaagaggaactggcaggagcacaggtctcaggaaggaaccaggcagcctgggttgattctctagttaagagcagagtggcttgtttcatatttctttctttctatttttttggagacagggtgtcactctgtgacccaggccggagtgcagtggcatgatcttggctcgctgcaacctctgccacccgggttcaagtgattctcctgcctcagcctccccagtaactgggattacaggtgtccgccaccacgcctggctaatttttgtaattttagtagagacagggtttcaccatggtggccagactggtctcaaactcctggcttcaagtgatccacctgcctcggcctcccaaagtgttgggattacaggtgtgagtcactgcacccggccttgtttcacatttctttctttcctttttttttgagacagagtctcgctctgtcgcccaggctggagtgcagtggcatgattcagctcactgtaagctctgcctcctgggttcactccattctcttgcctcagcctctcaagtagctgggattacaggtgcccgccaccacgtccagctaatttttttgtatttttagtagagacgggggtttcaccatgttgctcaggctggtctcgaactcctgaactcgtgatccacccacctcagcctccaaaagtactgggattacaggcgtgagccaccgtgcccggcctcatttcacatttcttaacctctctgttaaatggggaggacaacagggtatccttcataggactgccatgagggatacatggaaaggatttagcatggagctgtgcacgtagtaaacctggctggagtagtggccgtgttggtagttttgtagtatgatgatgaatggctttggattagtactttctaatccaaaatggctttggattagacttttcttcttacttttctgtgctttctccctgtagccactgtgatttatggcccaccagataggaacctagtttcctgctaacatagaaaatccaggctgggcgcggtgttgcatgcctgtaatcccagcactttgggaagccgaggtgggtggattaccttaggtcaggagttcgagactaccctggccaacatggtgaaaccccatctctactaaaaatacaaaaattaggccgggtgcagtggctcacgcctgtaatcccagcactttgggaggctgaggcagacggatcacgaggtcaggagatcgagaccatcctggtcaacacagtgaaaccccaactctactaaaaatacaaaaattagctggacgtagtgttgcatgcctgtaatctcagctactcgggaggctgaagcaggagaattgcttgaaccagggagtcggaggttgcagtgagccgagatggtgccactgcactctggcctggtgatagagggagactccatctcaaaaaaaaaaaaaaaaaaaaaaaattagcctggtgaggtggcgggtgcctgtaaccccagctactagggaggctgaggcaagagaattgcttgaacctgggaggtggaggttgcagggaagcagaggttgcagtgagccaacatcgtgccattgcactctagcctgggcaacaagagtgaaacttcatctcaaaaaaaaagaagaaaaaaagaaaatccatgtaactggagtttcaaagtaaatgtgaaatctggaatagttgaagcttctgggaatcacagaggccaagttgcagaggtgtacattatggaagattaaaaggcaggggaaacctttgaaatggcaatcatcagaggcctcacctcctgcctctttcgcaatacccaaagctgtttctagggttcctggtggtcgggagaggacactggacaagactgtggcagtggaaaggtgaacacccgtaacatctttggaaagacttggagttgtgaatgacaactgaactccaaacagacactaaagggaatcgttggtttacattctagctgcaggtagaggtggcctggccccaggaacctgggcactgtgagattcactctgacatctctgtggggatcattctcttcgttattttcctcaagaccaggggctagagctcaggtctgtcctttctgacaggcagcttaacaccataaaaagcagagactttctgctgctggctgcagggccctggaaaaggaccctgtttagctggcataagttatgtgctcatctctgatggattcaggcaggggtagaaacacgggtgggagaggatggttttagacaaagaacaacagccgtccatctggtcaccaaaataacctactagaaaaaggcagtctcagtttgcaggtgcagtgctgcatgcctgtaatcccagcactttgggaagccaaggcaggcagatcacttgcacccaaggattcgagactagcctgagcaacatgatgaaacctcgtctgtacaaaaaataacaaagcttgtctctacaaggaaaaaattagctgggcatggtggtgcacacctgtagtcctggctactcagaagggtgagttgaaaagatcgcttgagcctgggaggcagaggctgtagtgagacaagatcgtgtcactgcactccaacctgggtgtgacagagtgagaccctgtctcaaaaaaaaaaaaagaaggaggagtcagagggagtcagtggttactattgggctagagtcatctgaggaatcacagggtaagtgataatggggcagtggctactgagactcgccttcccattggttgaggttttgttctgaaacagaggatttggggtgggaattctcttctgtgtagatgagtaactggcttagaaaaccctgattggagtgtttctcagaacccccgtagaggccaggcgcagtggctcatgcctgtaatcccagcactttgggaggctgaggcaggcggataatgaggtcaagagattgagaccatcctggccaacatggtgaaactccatctctactaaaaatacaaaaattagttgggtgtggtggcgtgcgcctgtagtcccagctactcaggaggctgaggcaggagaatcgcttgaaccagggaggtggaggttgcagtgagctgagatcacgccactgcactccagcctggtgacagagcgagactccatctcaaacaaacaaacaaacaaaaaaagaactccagtagaacagatactgttcagcactaccagggttgtgctaggtgtggaagctcagtgaaatcttaagagttgacagttcttagaaaagggccatgtggacagggctgttccctggaaagtcctgtgacccctcagtgaccacttatttcttttgttgtcagcctttccctattttcttttcttttcttttcttttttttaagacaaggtgttgctgtgtcacccaagctggagtacagtggtggtaatcacggcagcctctaactcctggactcaagtgatcctcctgccttggcctcccgagtagctgggactctgcagatatgcaccaccacatgccccgctaatttatttttagtattttagaagcagtgttttgctgtcttgcccaggctcggcttgaactcctggcgtcaagctatcccacctcccaaagtgctgggattataggcaggagtgcccagccccagagttcttacaatgacttacaaggtcttacgtgatcttgttgcctcccttttgctctctgacctcatctttttttttttttttgagatggagtctcactctgccacccaggctggagtacagtggctcactgcagtcttcacctcccaggttcaagtgattatcctgcctcagcctcccgagttagctgggaatacaggcacgtgtcaccaggcccggctaatttttgcattttttttttcagtagagatgaggtttcaccaggttggccagtctggtctggaactcctggcctcacatgatccgcctgcctcggcctcccaaagtgatgagattacaggcgtgagccaccgcgcccggcctagtcacttttttcttaattgcaaccccgattctcagcacccttttcatcttggttttcctcaatagcccttaccaccagcagacacacatcatctgttgtacttgcttatttggcacatatgtatccacagcgcctagaacactgcctgtaacgtggaaggtgttcgatctatagagttttgtcgaatgaatgaatgaagccgactagtgcacagggagtgcagcggcgcgatggtagctctctgcagcctccaacacctgggctccagtgatccccgggctctgcccaccctccccactgccacttccgggcagaggccagcaaagcggcggcgcaagaggtagggagagaggagctgaggccccagatcagcggccgcgggcaaggtcgctcagcgggcacccggcctgggtatcggggcgcgggtcgggggcggggccggggctcaggggtggggccgggccgggccgggccgggcgcctgcgccataaaggccgccgcgcgcccacgcgcctcgcttgctgcgcgctgccggcgctccttcctcctcggctcgcgtctcactcagtgtaccttctagtcccgccatggccgctctcacccgggacccccagttccagaagctgcagcaatggtaccgcgagcaccgctccgagctgaacctgcgccgcctcttcgatgccaacaaggaccgcttcaaccacttcaggtgcgggcgggccggaggcgggggctgccacgcgcggcgcccggaaccgggcacgcgggcctggggtctggaggcgggggcagcggtgcccggggaccccagtccccgacctccaggccacggactggggcccaggccgagtccgcacttcgtccttggagtctccttggagtgcgttcctgggggcttgcagcctcgccgggagtctcggccccgggtctgcttcgttacgaggaaaaacgggcccctccgtggggacatttcccctcctcctccccgtgcagctctggccatttgagcaggggctcctttcgcagttgtgaagagaggccttggctgacgcagcaagcgggaaagggctgtccctttccatccgctcctggccacatgagcttgggagcgtctgcagggcgggcagcccgggcgggggtgtttgagggagctgggtggaaggatggagacgtcgggcgtgattcctgcagaagacacctgtgcacgaccgggaagtgggaaggagtgtttgagcaaatcatgggcgggagtgcggccaagggagctctgatcactgatactggtggaggcgggggaggggagcgactgtggctccgggctagacgtcccgatggccatccctgtcatctggatgggtgcctgagtaacttacggcagaaagtggaagccctgggaaggggtggtcccccacttcagtccgggctcctcatccagggtctgcctgcatctacggtctgtgaggatggcttctttctctgggctgctgttgcagatcatcctggtgggccagcaggtgacagacaccaccactgtgctgggtggccgcggcccttgtggggcgtgggtcagggaggatgtttcttctgggaacagctcctgcttagggcatggctccccgctagggagaccagggtgtggtcagcagcatctccatctttctgcagcttgaccctcaacaccaaccatgggcatatcctggtggattactccaagaacctggtgacggaggacgtgatgcggatgctggtggacttggtaatgttctgcttggggaggcataactggtaaccgacagagtggtgggtgagctgggctcctgggagtccccaggaccttgagtatcttgagttcttcctctcattagacctcagtcacctcctctgtgctggtgaggcacctgtccctggcttaggttctaagcagcatcccagggaccccagtgtctgatgtctgagtagacccttcccagacagcaggggagggaaccagacagcagccgtctgtctgtctcattggggacagcaccaagccttgtgtttgggggctgacacttggggtggccagtgtgggtgggaccaggcctcagtatcgtctcttcctaggccaagtccaggggcgtggaggccgcccgggagcggatgttcaatggtgagaagatcaactacaccgaggtgagcaggccccacataccctctggggcctccttccttccctttggggtttatctgactgttagccgcatcaccctgtgtcttcaccccttctcttgggcaatgcttttgcttaatgaggggcctgaaggcctttttcctcctgcttgtagcagggctttggggtgtgccttccacaagattggtttggtgagctccttggaatggttcccagtgtctgcctgggaggagcatatctcatacccacagggagagtttctcaaggctgacattttcttggagaagttaactctaatatatcctcaatgcaagttttagtagcgacaagaagaatcttagatcaccaaagacttcagcctactcaagcagtaggagtcaataggaagcagtggtgaggccaggcctgggggcccctgttcctgactcagtatgggagcccagcctggaggtataatggacactgagcacccagactctgtcctcatgatgtcattatcctcctcttacatgtgaggagtctgaggttcagaggtcacatcacttatctaagatgtcatagctgtaagaggcagaatggagattcacactcaacctgtcttgcattgtgggtctaagctgagagaggatgcaatcaaggaaggctttctggaggagtgcatttgccaataaaatgtggcgcaggagtggggtctggcagggtgagggtggggtggcatgaagccctccaccttagcaagcctctcactgggtcggaatcccaagatgatccttttcctgcccacctggggtcgttagaccttccctcaaggactcctctgctgacttcaggccatttcactcacgtggctgggccagccgcctggcacccgtcacagacttcaagtctggtttggttcctggcagttggtagttatcgggctgcttggtgagggaagcttgagttgcatgccttgctgcaaatccaaggagctgaggacactgcctaaaacgtgccagcaaacaccatggacacacattgggaggatgaggttacttcaggcttcatgagcactcatcttcggaaagcgtttatttatttatttattttgagatggagtcttgctctgtcgcccaggctggagtgcagtggtgcgatcttggctcactgcaacctctgtctaatgggttcaggcgattctctgcctcagattcctgagtagctggaactacaggtgtgtgccacccccacctggctgatttttgtatttttagtagagacaggatgtcaccatgttggccaggctggtctcgaattcatgacctcaagttatccacctgccatggcctcccagagttccgggattacaggcgtgagccatggcgcccggcctctgaaagcatttattgcttgtttctgacatgtattgttgccattctctgcctttgctcactgttcctcttttctctcactgttcatgccctgagcatctctggcaggccttcggggcctgtcctaggcatatatgggtcccctcctctcctcctgactgtctgcagcacataagtccttggggagctcctactcctctaagcatacagtgggttcttggaacaaggttatggtgctaacagagacctcagggcctgcctgtctagtggatagagggccgagctatggcaccatgcccagctgggagcatggctgcctggggttggggggggcagtctttatatcctgaccgtaatccccagggtcgagccgtgctgcacgtggctctgcggaaccggtcaaacacacccatcctggtagacggcaaggatgtgatgccagaggtcaacaaggttctggacaagatgaagtctttctgccaggtaagtggctactgggccggactcacccttggccgtgtgtgtgagttatttgggaatctgggagccctaaggggcagctcttccctcttcttgtaggcaggactcaggttctcactgcagcttaagggaggggttgcctgtgtgatcgctgaccctggagtctctgctgaggcctgaatttctcctggctctgctctgaaggaatctgctgctggcagaagtggggccagtttctttcctgaattgtagacacctatggactcatggtgacaaaccacagaggcttcaaatgaaaagtggggcccctgagagacaggacagtcaggaaaggaaggagctttttcttttttctttttttttttttgagatggagtctcactctctcgcccagagtggactgcagtcgtgctatctcagctcactgcaacttccgcctcctggattcaagctattctcctacctcagcctcccgagtagctggaattacaattatgcgccaccctgctcagctaatttttgtatttttagtagagacgggatttcaccatgttggccaggctggtctcaaacccctgacctcaggtgatctgcctgcctcacctgggattacaggcatgagccactgcgcctggccggaaggagctttttctaatctcttttgtcatacgcccttatcacccagtctagaaacagataaaacattgtaaaatttcctcaaccctggctgggcgcgatggctcatgcctgtgattcctgaactttgagaggccggggtgggtggatcacttgaggtaaggagttcgagaccagcctggccatcatggtgaaaccccatctccactaaaaatacaaaaattagccagttttggtgacatacgcctgcaatcccagctacttgggagactgaggcaggagaatcgcttgaacccgtgcggcagaggttgcagtgagctgcgattgcgccactgcactccagcctgggcgacagagggagactctgtcaaaaaaaaaaaaaaatttcctcatccccattcccagctaaccctccagaagcagcctttgtaaagtttcctgtagccaggcgcagcagctcatacctctattcccaactattcaggaggctgaggtgggaggatggcttgagcctgggaagttgaggctgcagtgagccatggtgacaccactgcactgcagcctgggcgacagcaagatcgtgtctctaaataaatttaaaaaatagaaaagttttcctgtgaagtcttccagaaagttcctgtgcacatacacatctgtcatctcctctttgaaacacgtacacatgtgcacatgcacacaggttggttttctccctgctcctctgaagcttatttccacctggaagtatgtaagcagtgtccgtgtgtcagtgacagtgcatgtaacatgccttcttttccttgtgtgtagggtggtaggggttgcctcagagaccagctaagtttccccacatcaagcacttgcctcagtgtctaccctagcggtgattctgcaggggtgggttggcagacatcctcacgtctggagaacgagggtgatgccggtgtgcctgtgtgggctgtgcatgctacgagggtgatcgtccaaactcttgtcagctgtgatcatttgctgcttgtcctaggagcagtggcctccatgtgtggctggtcagagtccagttactttggccaagagccactttcagacctgaaaatgggctgggtgcagtggctcacgcctgtaatcccagcactctgggaggctgaggcaggtggatcatgtgaggtcgggagtttgagatcagcctgatcaacatggtgaaacgccgtctgtactaaaaatacaaaaaaattacctgggcgggcatggtggcgagcacctgtaatatcagctactggggaggctgaggcaggagaatctcttgaacccgggaggcagaggttgcagtgagccaagatcacgctactgcactccagcctgggtgacagagtgaggctctgtctcaaaaaaaaaaaaccaacaaaaaaaccaacccatctctggaaaaaataaataaatcagctaggtgtggtggtgtatcccagctacttgggaggctggggtgggaggattgcttgagcccgggaggttgagtctgtactgagctgagattgtgccactgtcctccagctcaggtgacagagtgagacgcctccagggcaaggaagttgtggggtcctgatgggaatctggatttcctgaatgtcacttagggtgatcagtccatgtgatggtctttgggtgtgtggcggggcctttccagccatctgctgtgagtggcagagctgaagtgcattaaaagcctagtgctgtgtgatcagtctgggtgtgctcagccatgccacatggcgaggatggcactgcaccgtctggggtgctgtttccaggaaagccttcccttaaagctggccactggagtacctgactcaggctgataaggtatttatagttcaaaaaaagttgctgaatggcagtaatcccctggtgaggaacattccccatggctgtgctctccaaagtttgccaagattgggtgaagacgttcactgtgaccttgattgtagtggcaaaacctgaaaccaagctgtactcatttgtcaggggacttacaaagtagagtcagcacatattcatatactgtcatcctgggcaccaatagggattagggagctatagttggattgatctgccatgctgttcaggatggactgggaagttgaaaaaggaagttgcagaattggtgggtatggtaaagactcatttggtcaaatgaaggctgggtgtaattgtaataaagatagacacatttggcttggtgcagtggctcacacctgtaatcccagcaccttgggaggccgaggtgggtggatcacgaggtcaggagttcaagacaagcctggccaacataatgaaaccccatctctactaaaaaaaaatacaaaaaagttagcctggcatggtggtgcatgcctgtagtcccagctactcgggaggctgaggcaggagaatcacttgaaccccagaggtggaggttgcagtgagccaagatcacgccactgcactccagcttgggcaacagagtgagactttgtctcaaaaagaaaaaaaaaaagacacatttttcctctgggatgcttcattataacaaacctttgacagtcgggaaaggagacttgcttttttttttttgagacagagtcttactctgttgcccaggctggagtgcaatggcgagttctcggctcactgcaacctccgcctcccaggttcaagcaattctcctgcctcagcctcctgagtagctgggattacaggcatccgccaccacacccagctaatttttgtatttttagtagagatgaggtttcaccatgttggtcaggctggtctcgaactcctgacctcaggtgatccacccaccttggcctcccagagtcctgggattacaggcatgagccaccacacccagccaagacttgctttttctaacctcttttgtcacacgcctgtgagggagggttgagaagttgaacaacttattttatttctttctgtattgatggaaattttcccatggcagtttatttaaagaaaaagtagggccaggcacagttgctcacatctgtaatcccagcactttgggaggcagaggcaagaggattgcttgaggccaggagtataataccagcctgggcaacataacaagaccctgcctttaacaaaaatttaaaaattagccagctgtggtggtgtgtacctatagtcctggctgcttaggaggctgaggcgggagaattgcttgagcccaggaatttgaagctgcagtgagctatgatcatactcctacattccaggtcgagcaacagagcgagaccctgtcgttaaaacaaaactaaaaaatacccagcaaggtgcagtggctcttgtataatcccagcattttggaagggtgaatcggatcactgcaggccaggagttcaagactagcttgggcaacctagaccctgtctcttttttgtttgtttgttttttgagacagagtctctctctttcacccaggctggagtgcaatggcctgatctcggttcactgcaacctccgcctcccaggttcaagcgattctcctgcctcagcctcccgagtagctgggattacaggtacctgccaccacacccagctaatttttgtgtttttagtagagatggagtttcaccatgttggctaggctggtctcgaactcctgacttcataatctgtccacctcagcctcccaaagtgctgggattataggcgtgagccaccgtgcccagcctattttttttttttaattaaaaaataatttatagtctgggtgctgtggctcacacctgtagtcctagcactttgggaggccgaggtgggcggatcacttcaggtcaggagtttgagaccagcctggcctacatggcaaaacccgtctctactaaaaatacaaacaaaattagccaggagtagtggcaggcgcccataattccagctactcaggagactgaggcagcagtatcatttgaacccatgaggtggaggttactgagagctgagatggcgccactgcactccagcctgggtgacagagcgagactctgtctcaaaaaaaaaaaaaaaatttataactgggcatggtggtgcatgccggtagtcccagttacttgggaggctgaggcaggagaatcgcttgaacccgggaggtggaggtttcagtaagctgagatagcaccactgcatgccagcctgggtgacagagcaagattccatctccaaaaaaaaaaaaaaaaaaattaaaagaaaattgctggatcttattagtgtatagtaattttttattgatgtgtgggaaattattccaaaatttagcaactagaagcaacaatcaccgtctctttatgtggggaatttgcagtggctgtgtttggtgtagtggctctgatattctaaggttgcagtcaagatgttggctaaggatgtggtcatttgaaggcttcatgggggttggagggtctgctttgaagatggctcactagcagtgctgcctttgggaggcacagacagttcgagtgtcctcatgacaaggcagcttatttctcccagagtgagtgatccaatagagagtaaggcagatgcctggaggtcttttgtgacctaatatcaggattcacattctttcttttttttatttttatttttttgagacagagtttcactcttgtcacccaggccagagtacaatggcgtgatcttggctcactgcaacctccggtccccggctcaagcgattctcctgccttagcctcctgagtagctgggattacaggtgcccgccaccatgcccgcctttttttttttttttttttttttaaatttttttagtagagatggggtttcaccattttggccaggctggtcttgaactcctgatctcaagtgatccgcctgccttgccctcccaaaatgctgggattacagggtgaaccaccacgcccggctacactctttgatttctataataccccgttggtgttacagatcagctctggtcatcatgggaagggactgcatcagtgggttaatgccaggagacaaggaccactggtcaccatcttagaaggtgggggactatcatagtcccgcttctggcgcctagtgattgattttgttccttccacacacagataccccactcactttctcctaagtccatattctgttacagtattagaagtctgttagaagtctagaacctcattttgtcaagtacaggtgtagtagtacctgcatttcctttagtacagttcctttcaatctgaagacatgagaatttaaagagacaaattacccctcacacacccagcatacaatggtgaggtgggcatgggatgactggtatgtatgggataattatttcttttcttttctttcttttttctttttttctttgttttttttttttttgaggtagggtctcacactgtcgcccaggctggagtgcagtggtgcagtcactgctcactgcagcctcgaactcctgggctcaagcaattccccacctcaaccttctaagttgctgggactacaggcacatgtcaccatgcctggctacttttttattttttgtagagatgacgtcttgctatgttgcccaggctagttttaaactcttggcctcaagtgatcctcctgcctcagtttcccagtaagtgctgggattataggcatgagccactgagtccggcctgcatatttaggtttttattatgaccacactgtacttctgataccaaaatctgtattagttatctatcattgtataacaaatgacatcaaaacttgggttaaaacagcaatacacttttttttttttttttaagacggagtcttgctctgtcgcccaggctagagtgcaatggcgtgatctccactcactgcaacctctgcctcctggatttaagcaattctcctgcctcagcctcccgagtagctgagattacaggcacacgccaccatgcctggataatttttgtattttttttttttagcagagacggggtttcaccatgttgactaggctggtctcgaactcctgaccttgtgatctgcctgccttggtctcccaaagtgccaggattacaggtgtgagccaccatgcccggcctagcagtaaacttttattacctctcacagtgtctgtgggtcagaagtttgggagcggcttagctggttggtcttggtttggggatctctcataaggctgtagtcaacatgttggccagcgccccagttatcggaagttttgatgggtttggaggacccccctctaaagtgtcccatacacaggaagcgagttggctgtgacttttggaaaaaggccttagttcgctgccgcgtgggcttctttatgaaactgtttgaatgtcttcacaacatgatagacagcttccccaaagcgagtcatccaagagagcaaagcagaaactgcacgttctctgaactcacttctgaagtcacatttcacccctttttgcagtctctggatgggtgcataggtcacccctcccagcacaggcggaagctatgcagaggcatgaattccaggaagcaaggatcactggtgtctgattggagactggctgcgggtctgatactcctttccccagcatagcccagtcacagttttcaacatttcacatctcttggtctctggcatagcagattctgccgagttatccctggttttgcaaattctgacagtgtcgctgtaaggtagggatgtctcactgttgtaaccaggaaagagtctagttggtggtgagtgtggcagggaccagtgtggtctccagagactcctatgccttgtgtagtggctcacgcctgtaatcccaacactttgggaggtcaagatgggaggattatttgaggccaggagttagagaccaggctgggcaacgtagcaagacgctgtctctacaaaaaataaaataggctttgcgtggtggctcatgcctgtaatccaagcgctttgggaggccgaggcaggtggatcacctgaggtcaggagtttgagaccagcgtggccaacacggcgaaaccccatctctactggaaatactaaaaattagctgggcagggtggcaggtgcctgtaatcccagctacttgggaggctgaggcaggagaattgcttgaaccctggagcctggaggcggaggctgcagtgagctgagatcgtgccgttgtactccagcctgggcgacggagtgagaccctgtctcaaaaaaaaaaaaaaaaaggctaaagcagagcattttgttctgtttttggagtcagggtcttcctctgtcacctaggctggaggtgcagtgttgcgatcttggcttgctgcagcctcaacttcctggactcaagcaatcctcctgtctcagccttgagccaccctgcctggcccctaaggcacagttttaaaaataagtaaatagcgaggcgcggtggctcacacctgtaattccagcactttgggaggccgagctgggcagatcacttgaggccagtaattcgagaccagcctggccaacatggcaaaacctcgtccctactaaaaatacaaaaaaattagctaggcatgctggtggcgcaggcttgtagtcccagctactcaggagactgaggcatgagaattgttagaacccagaaagtggagactctgtctcaaaaaaaaaattaaaaataaatagctgggtgcggtggctcaagccagtaatcccagcactttgggaggctgaggcgggcagatcacagggtcaggagatcgagaccatcctggctaacacggtgaaaccctgtctctactaaaaatacaaaaaactagctgggtgtggtggcgggcgcctgtagtcccagctactcaggaggctgaggcaggagaatgacgtgaacctgggaggcagagattgcagggagccgagatcatgccactgcactccagcctgggcaacagagcaaggcttcatctcaaaaaaaaaaaaaaaaaaaaaaaaaaaaaaaaaaaatatatatatatatatatatatggtaaattaaaaacaaaaaaatagaggcacctgcgagggcctgaaagctgggactgaggtaccaggacacggcagtaatgatgtttttgagcagcggattatgcctgggggtttgggctgatggcatcttcgcccctgtgccagcgtgtccggagcggtgactggaaggggtacacaggcaagaccatcacggacgtcatcaacattggcattggcggctccgacctggtgaggagaaaactgccttggggtagggtgggagtctgggcactgttggtcccactcaggtctttactttctccagggatgggacctggctgtctccacttttcgtgggccctgaattcttattctctgatgctatgtctccccgcagggacccctcatggtgactgaagcccttaagccatactcttcaggaggtccccgcgtctggtatgtctccaacattgatggaactcacattgccaaaaccctggcccagctgaaccccgagtcctccctgttcatcattgcctccaaggtatgagtgccgaaaactgcccggcccctggccctgtgtgtgttggggtggggagggacagctgtcttgccatccccctggccattggtcccttttggtgggttccgagtgaaccatggtttgtggatcaggtcagtacagctgccctagactgtttccatgcctagcagcaaataaggttgactgatgaaatcctgaacacatcagtttgaacctttgtgtcctgaccacacccgctcgccttgcggcatctctgctcagcctgggactgctcgccactttcttacaaacctgtcctttatgcctgctccttttcttgttgttgtttttgagacagagtctggctctgtcacccaggctggagtgtagtggcgtgatctcggctcactgcaatctccgtctcccaggtttcaagcgattctcctgcctcagcctcccaagtagctgggactaggcacacaccaccacgcctggctaattttattatttatttatttattattattattttttagtagagatgggcttttgccatgttggccatgctggtcttgaactcctgacctcaggtgatgcacccccccttggcctcccaaagtgctgggattacagtcttgagccgccatgcccagccatgcttgctcctttctgatcccagagccatgccctgataatagaggggttttgtttgtttttatttatgttctatttactcacatgaatgtacataaaatatgaagaattccatctgaattctgagataccttccagcctgggccgaagagagcctcaggttgactgcagcccctcaggggagaagctgcggcctttgacctgcaggcttagggttggggggtgtgtttaccgtcccccctcctctggttttaaagagctggaatctcaggaggttatgtggcgtcactgtcactgacctgcaaatactgctccatgggacagctgggcattgccttggcctctactgctgaaccctggctcaaggcctgcacccacccctaagctcgggcgcccactgctgttctctttggttgcagacctttactacccaggagaccatcacgaatgcagagacggcgaaggagtggtttctccaggcggccaaggatgtgagtgggctatagggccttcctcgtggttagcctctgggctgggaagagcagggtgggcccctgagtgaccaagtctggccgtgtttctcctgaagttggaagtgaaggcggccttgccggtgcctgcctttgctagatgagatgattgttcatcttggctttgtcagacccagccttgcagatgtgacagaacctgctctcgctggctgacagcccttgcatggccctttctctgcaggcccttggcgctgcaggaactcttggccacacctattttataggggagggacgtccctgagccccgtatgcttgtaagatgggatgagcaggcggcctgtgacccgtctgctttcttgaccttgacctcgatgtgggccttctccaacagtctcagaaccaaggactgggaatctcagtcccatgcagggccttggttcctctagtgatgggaagtgactaccctttgtctccctgggctggctgtggtaacttggctctgtctcttgtagccttctgcagtggcgaagcactttgttgccctgtctactaacacagtaagtgcccccgtggtcccctgtactgccttcctgggagtgcccagcatgtccaggtcatggcctctcagagacgcggttcgtaggtctggtggatcttggcttggctgatggtatggaaggtttggttgcctgtgggctgcaagccttccttgccttttccgcatttacccattcaacctctgcagctttgaggagggaggcttggagtcagtgggatcacgataaccccttcttccgtctcccaggcctgactgatacacagaacccttcatacacatgaccttcctaggcctttgtgcccagcatctccccaaatgtgacatgctaggtaggggtagaggatgcattccatttttcacttaaggacataaagccccaatgaagggaggtgacattttgccccctacttagtgtgtgtggttttgttttttttttttttttttttttttttaagacagtctcactctgttgcccaggctggagtgcagtggcgtgatcttggctcactgcaacctctgccttccaggttcaagcgattctcctgccttagcctcccgagtagctgggattacaggtgcacgccaccatgcccagctattttcgtatttttagtagagacggggtttcaccacgttggccaggctggtctctgactcctgaccttaagtgatctgcccacctcagcctcccaaagtgctgggattacaggtgtgtgccaccatgtccagcttattttttgagacaaggtcactctgtcactcaggctagagtgcagtggtacgatcttggctcactgcaacctctgccttctgggttcaagtaatttttatgcctcagcctgctgattctgggattacaggcgcccactaccacgtccaggtaatttttgtatttttggtagagacaggttttctccatggtggccaggctggtctcgaattcttgacctcaagtgatctgcccacctcggcctaccaaagtgttgggattataggcatgagccactgtacccggcccacttagtgactgtatgagtaggtgatgccaggattagaacctgggtctcctgtctccaagttctcacagtctgcctggcctcgaggttgtgcaggctcagcagggcatgacagagtgagggatgctccaggagtgacagcagcagtcagccagtgggcactgtgctgtgtcagagctggggactacacccacatctccctcccaccccctccaccatcatccccacatctctgcctccagtgcctacccagctgcagcaggacgccataaggctggctaaccatagcactgttgcctgcctgcaactgactggtcagtagggcttctcctcctatgtggaataggtaaggaattgctggccctgtctgccctggggaccagaatacctgatggctcctcagagcttcctggtgcagtcaccctcccacacatgggaagggctgggtggctgttcagcctgtgtttgtttgcctggcctggtaggtggcccctgcccacacttgggtcccagtcctaggttcggttcccagatgtccaggggtatcatgctctggtgtcccaggcaggcctgggtgagagctgttgcagagcagtgtgtgggccaggtcctcacacggggttacagctgccctcagcagggggctttgcaggcacaacgtcactggcgtgctggtcatggactgatctggtgtccagcttggggtgggcagatcctgggccctgccctcgactcacaggctgctccagccctgccccatccctggctctggggaaggtgaggctcagctcacggagcacagctccctgcctcccggagctcctgttcccatcccgctagcaaatgcttctttgcatttctctccctttgtttttttttttgtagaccaaagtgaaggagtttggaattgaccctcaaaacatgttcgagttctgggatgtaagtacaagcacttctgcactgggtgaattaagtgtcctttgccaagtcatggctgttgagaggcccatgaggtcaggtcagtgtttattgagtacctgctgcatacctagcttggggaaaggtagagaggccctcagagaggcttggagggcaagagcaacccaggcaggatgagggctccacttccacctgagggcgggctgagcttgcagggccacatgacactcccttgggtgcctgcctgcaacacccactgtggggtaacccgagtcccccttgccacgctcacagagttgaggttgtgagttattctcagtgatgacctttctctgaactgcagccaccatctgtaaaggccaagggcagggtgaggcatgaggtatgaccgggtaggcctggaaaggagcaacaggagctgcaggaggagctgggggggtggcgtagaggaggcgccaggctggggcagcttgcagagcaaaccctgccttgagtgacagggctgccgacccctctgtagcaacaggtggtccatgggaccacctctgctggagccgagcagtgagccacagctttccttgtgcacttgcctgagctcagcagtggtgtgaggagggctctgactgtgaagcccagggtgcaggggtgcagtgcagggtgtgatgcaggcactgtgaatgctgtgggcatggccgggcttacgtgcagggctctaacgctgtggcaggcgcagcagagagggcattgcccatttggtggttttcccacctggggctgtctccaggcatttggaccagaggccctttgcttggtgatggcatccacagacataacctcattcctttgaaagctctaaaggccttttactaccagggtctgggagagaatgaagccctaatcccttaagccatccactgtgtataatgagttaacttctttctagaatgagactagttacataccatccttggaagaattgacgagaatcactcaagtcattttctgcatcctgtggctcagatgcggaacactggtcaagagagactgtgcggcttctaataaatgttgcatggctgataatggagggcaggcaccttccacctcctccttgggatctggagcctgagcaggtggtgggcagggatgtgtgggtgctgctgccagccaaggagccaagcagatcggggtgtccttgcttgtcaccacccagcatgtagagatgagttagggtgtggcttaaggagaggatgggtctggcctcccaggtaaggcctaggaatgatagctggacacaggaacatggggccagggctggctggtgagacctaagtggaggcctcctgggccaggctagacagcccacaacggctggaggagggacctgcctgagttactagagtgtatcctgctgaatcaagaaggtgatatctgaagaacccagggataggagcaggcgaagttcctgcaggtggggtctcgggtgagctacagccatcagctcaggcctagggatgcagtgccggccctcaggtgagatcagaagagtcccgtctggtaggggtatgtagaagaggtaattcttggtccgccagggccagttttgcggcagccatgggtgtcgggatcaggcaggggtgtggtgggaaaccatggggtctctcagggctcggccagggtcagcgcacgccacagggccagttttggctggagaggcctgaagcagagccagagcaggtccaggtgagttctgaagaggagccaggacaggagagggacccataggtctgtgaattccagaggagaggcaggtatttagaggtggttctgtcaggtgaagtctgaggagccaaagctatgtatgtgcatatgtcagccgggctctgtgggaggtggtgtagacctatggcatgggacaggtgtgcacgctgggatctctggccggttccgaaaagtgaggatcaggtagtgggtggctgattgcacaagtttagaacccaggattagggacacacaggtcagcacctgcttctcagcatcctgactgggtgtgatgggcagagctcagggcgtcagaggcctctgagaatttgtgactgaagtccaagtctgtggcatcagggtctgcagagcccagatgcgggagaggtaggaatgtacctggtgatatgaggcaaggacaggggagctggggcaggtgaggcaggcaggtggcatgaggagctgtgctgggtgggtgcggtctgagtggctcaggttgggtaaagggccagagacctgggtctacagggcagacatcaaggctgagccagtcagacagtgtttgtcaacactgggctctcaccaggctccctcaggccgaggtcagcagccagggatctgtcatgtgtgaggaaagtgtctgttcaggttaggtgtgtataatgcagcctttcagagccgcgtctgtctgaggtcctaggagctggaatcagacaggtttgtatggctgggtttctaggggaggcctgaggagccaagactgtactcaggtaggcagaactggaccagtctggtaaggacgttggagctaaagataggcagacaggtcgagctgggtctgacaagtgagggctgaaaatctgtgattgggtccaggttggagctgtgtccttgggcgatgtctgagcagctctggtgggtgagcctgggtcccctgggaagagaccagacaaagggatggggtcagacaaagggatgacgaaccgcatccatcagaaaggtggatgaagcctgggtctggtcgaggtacgtagagcagatctagcaggcgaggtttcaggggttaaggtgagacacaggtatgtatttttgggtctcacaggttaaggtctgagccactgaggtcaggctctggtttgtatcccaagaccgagaagctgtgttaagcatggtgggtagagtttgtcaggtgacatctatgaaaccaggagcatgcaaagataggttgaccggaacagccatggtcaaaccaattaaactgtcctgcagttgaggtcaggcacaggtagaacggatctatcaggtgaggcccaaggagtccggattaggctcatctagaaagacctggatgtggtagatgacctctgaggatatgaagtgaaggcaggtggatagagccaggtctctcaggaggtctgaggagctgggatctggcacagtgagcaggtctggatttcccaggtggtgtcaagacagatgggtaggccaggcacagtggctcacacctataatcccagcaatttggaaggccaaggcaggcagatcagttgaagtcaagagctcgagaccagcctggccagcatagcgaaaccccgtctctactaaaactacaaaaattagccaggcatggtggtgcatgcctacagtcctagctacttgggaggctgaggcaccagaattgcttgaactggggaggcagagtgagccaagatggtgctactgcactccagcctgggtgacagtgagactatctccaaaaaaaaaaaaaaaaaaaagcgggggttgggtgtggtggctcatgcctgtaatcccagcactttgggaggccaaggtgggtggatcatctgaggtcaggagttcaagaccagcctggccaacatggtgacggggtgaaaccccatttctactaaaaaatacaaaaattagctgggtgtggtggcacacgcctgtaatcccagctactcaggaggctgaggcaggagaattgcttgaacccgggaggtggggtttgcagtgagccgagatcatgccactgcacttcaacttgggcaacaagagtgaaactttgtctcaaacaaaaaacaaaaaaaaaaaaaaaagaaaaaagatgggtgggtagaagttcttctcctgggtgaggttgaggagctgtggccaggtacaggtatgtaggtatgtggaattgagtttcttgggtgaggtctttggagcctggcccaggtacatcttcgggtctatcaggtctgaagaacgggagttaaacacaggtgtgtagaacagggtttggcaggtaaggtctttggagccaggatcagggcagcttcacaaagctgagtgtgttcatgagacctaaaaagtcatagtcaagcccaggtaagaagaaccaagtgtgttggatgaggtgtaagcagctgaggtgtgaagtagaggtaggcagagctggcccacaaggtacaagctcaggaaccctcatcacatgcaggtagggggtgctggtccaccaggcacaagcccaggagccagcattgagcacaggtaggcagacttggcccaccaagtatgatctgaagagccaacatcaggctcaggtaggtagatctggcatgccaggtgtactccaaagagccagagtcaaacacaggtaggtagagatagtctttcaggtgtggtttaaggagccaaggtcaactacaggtaggtagagctggcccactgggtgtggtttgaggagccagggtaagcacaggtaggcaaagctggcccaccaggtatggtctgaggagccagggtcagactcaggtaggtagagctgcctgccaggtatggtctgaagagccaggatcaagtacaggtaggtagtctgggtcactaggtgtggtctgagaacccagcgaaaagctcaggtaggtagagatagcctttcaggtgtggtctgagaacccagggtcaagcacaggtatgtagagatagcctttcaggtgtggtctgagaacccaggttcaagcacaggtaggtagagatagcctttcacgtgtggtctgagaacccaggttcaagcacaggtaggtagagatagcctttcaggtgtggtctgagaacccagggtcaagcacaggtaggcagagctggcccaccatgtgtggtctgaggagccagggtcaggcaggtagacaaaactggtctgccaggagtagtctcttgaaggagagctgaggagttaggttgaatgcaggtagatagagttggctctttcaggagttggattcaggcacaggaatgtgcccctgggtgtttgaggtgaagcctgaagaaccagagttgagcctaggtgtatagagcggcctcccaggtcaaccccatagcatgggggtctctacaggcaggcagaacattgtgggtttcctaggaggtctgtggcccctaagttagacgtgggtaggtagatgtatctctctcaagcaaggactttgtagctagagagacatacagctggggtcttgcaggtgaggtcattggtgcgtggttctggcttagttgtgctgactcagtcttaggcctggggacagtgggttagtcacaagttggtagaactacgcatctcagctggggagcacaggtaggcagagatgttccatttgatgaggtctgaggctcctcagtgagctcattggtgctgacgttaagcagagattggcagcattggatctgtctgtgagacatgaaaagccaagccagacacaggatgtggactgccgaggccaggctcacataaataaagctggaccctgggaggctgtaaggaatctgagttgggcttaggcaagggaaccgggtctgtcagtcaaggtgtgaggggtcaggttatgtgaagcctggtctatcagctgagatgtctggaacccatctttgacaggtatataactctgtagcctgaggcactggagttggacacaaataggcagaactaggtctcccaggtgaaaccattgcatcgatgctcagtgctggtatgtttatctggtgttgtcagtgagtctgccgatgcaggctcagtgctggtatgtttacctgattatgtcagtgagtctgtggatccaggctcagtgctggtatatttacttggttgtgtcagtgagtctacggatccaggctcaatggtggtatgtttacctggtgttgtcgtgagtctgtggatccaggctcagtgctggcatgttgacctggtgttgtcagtgagtctgtggatccagggtcagtgctggtatgtttagctgacattggcagtgagtccatggatccaggctcagtgctggtatgttgacctggtgttgtcagtgagtctgtggatccaggctcagtgctggtatgttgacctagcattggcactgagtctgtggattcaggctcagtgctggtatgttgacctgacattagcagtgagtctgtggatccaggctcagttccacagaggttgtataaacatggtctcaggtgggttcttgacacctgggttcaagcacaaaagtactgctgggcttgttaggtgaagtgggtggggtctagcacaggaatgcataatggtgaggctggccaggcctggggaaggtgggtcagacacaggtgagaccttcggtggtagggtcagacacaattaggtgagtagtgtgggctcttatatcaagggaaagccgtagtcattgtaggtgtttgtacctgggtctgcctggtgatgtctagggaaccctaaagatcagctgggacaggtatctgttctcagcaccctggtcaggtatgatagacagagctcagggtaatacagagggctgaggatctgtaaccagtccatggtgttggtctgcatccaagatggcattgtgctccagttgacacagggtctgagttaaaagtgaggaaagttgccaggcgcagtggctcacgcctgtcatcccagcactttgggaggccgaggtgggtggatcacttgaggtcaggagtttgagaccagtctggtcaacacggtgaaaccccatctcctaaaaatacaaaaattagccatgcatggtggcacatgtctgtaatcccagttactcaggaggctgaggcaggagaattgcttgaacctggcaggcagaggttgcagtgagctgagatcatgccactacactcaggcctgggcgacagagtgagagaccctgtctcaaaaaaaaagaaagtgagtaaagtgaggaaaaaggtagatgatggttagataaggtgagatctggggcactggggcaggttaggcccaggacattgaactgactgaggagctgcatctataatgtatggtctcagaggccactgcacttaaaggtgaggtctagagacccatgtctgcagattgagggttcggaggctcaggtcagacactgcttggcattgctgggctgtcacaaaactgggatctgaggacctgttctcggccaaggtgagcagcctggactctgtcagccagagggctggctgtgtgctgaagtttagtttctagagctgagtctgggctgggtgtggtggctcatggctgtaatccctgagcttcgggaggctgagatgggaggctgaggccaggtgttcaaaacctgcctggacaacagagcaagaccccatctctacaaaaaatttaaaaaatagtcaagcatggtggtgtgtgcctgtagtcccagctactggggaggctgagatgggaggatcacttgagcccaggagtttgaggctgcggtgagctgtgatcatgccactgcactccacctgggcaacagagcaagaccctgtctcttaaaaaaaaaagaaaaaaatagaactgcatctgttagatgagatgtgagagcctatgtcaagcatgatgtagtctgtaggactgcgtctgtcaggtaaggttcccggaaacccagagcctttccaagtgagtggccccaccggtcatctcattgcccaagccagaaacctctcggccacactggagagctcccagaatgagtcctctgcactccccagtccatctccggggcttcaaagtggcttgtttgcttctgtccttgtcttagccgcagactgttctcagtcctcccaccgtgcctctcagcttccaccctgcggtccccaccccttcctttatcctctggaaggtgctatgcttccccctgcctcagtgggcttccaggagagaattaagccctcacagcccaaggcatctactggatgtaataagtgggcacctctccttcgtgtctagaaggttactagtcttggaccatccttgggagaactgagaagtcactcagatcattttctgtgggccttaattctgtcacgcttgagaaagactgctttggccacgggacctttgcatgtgctgttatggctgctggaatgctccctcagtgcttctctgggtcatgcctgctcgttcttgagatcaagggtcaagtacccctcaggttccttttataagtggcctcagcaccatgttccaatttctcctcagcacttgtttctcagtttcacatttattggcatgattatttgatgtacgtctctctcccacactctgtgtccgttgcctgtgctagaaatgtgggaggtgctccataaacagctgttaggaagacatccgtgaagttctgaggactctgatggcaccaagtggagcttgcaggtgtggcttgagaaggtgcagtgtgaatgataggcctaggtgataggccgagaagatcggtcaagcccagatatgacccactgggcctgtcagtgtccaggaggtggggtgaggcacaggtctaaggttctggatctgtcagtaccacctgaggagttgggaatgggcacaggtacaaagtgatgagtcttcattgttcaacaaagaatggcacaggtgtgaggatctgggtttgtcagtatctgaggatgtggggcctggcacaagtatgaggcactgggccactgttcaagcaggtgggctggggaacagaaatgtagctgtgggtttttaatatctgaggagacctagccaagtgtagcagagagctgctgggtctttcattgtccaaggaagcatacctgggcacaagtatgagactgagaaggtgggtcctggcaccggtaaggggctctgggtctgcaagtgtctatggaagtagggcctggtacaggtatgtggtgctggaagaggtatccaaggaggtgggctaagtacaggtatgacatctgggtcttccagtgtgtgaggaggtaggatctggtacaagtatgaggccctgggtctgctggtgtctgaggagataacagcaggttacaggtatgaggccctgggtctgctggtgtctgaggaggtaacatctagtacaggtatgaaatctgggtcttcctgtgtctgagaaggtagcacctggcacaggtatgaggatctgggtcttcccaatgtttgaggaggtagcatctggcacaggtatgaggatatgggtcttccatgtctgaggaggtagcacctggcacaggtatgagaatctgggtcttccagtgtctgaggaggtagcacctggcacaggtatgagtatctgggtcttcccgtgtctgaggaggtagcacctggcacaggtatgaggatctgggtcttcctgtgtctgaggaggtagcacctggcacaggtatgaggatctgggtcttcccgtgtctgagtaggtagcacctggcacaggtatgaggatatgggtcttccatgtctgaggaggtagcacctggcacagatatgaggatctgcgtcttccagtgtttgaggaggtgagtttggactcaggtttgaggcccttgggcttccagtgcctgaggagatagcatctggcacaggtatgaagccctgagtcttctagtgtctggggaagtgaggctgggtacaagtatgaggatctgtgtccatcagtatctgaggaggtgggatcgggtcctggtatgaggatctgggtctgtccatgtctaaggaggtaagatctggccctggtatgaggatctaggactgtccatgtctgaggagttaccatctggtacaggaatgaggatctgggtctgtcaatatcagaggaggtaggaatctggtacaggtatgaggatctgcgtctgtcaaagtctgaggagttaccatctggtacaggaatgaggagatgtgtcttccagtgacttaggaggtacgatctcttataggtatgaggatctgggtctgtcaatgtctgaggaggtaggatctggccctggtatgagaatccgggtctgtccatgtctgagcaggtaggatgtgtccctggtatgaggatccgggtctgtcaatttctgaagaggtgggaatttggtacatgtatgaggatctgggtctgtcagtatctgaggaggtaggatctggtacagttgtgaggatctgggtcttcgggtgtctgaggaggtggcatttggcacaggtatgagaatctggatcttctagtgtctgaggaggtgggatctggtattaattatgagaatctggttctgtcagtgactgaggaggtaggatctggcataagcatgaggatctgggtctgtcaatgtctgaggaggcagtatctggtacaggtatgaggatctgggtctgtcatgtctggaggtaagatctggcatgagtatgaggatttggttctgttcatgtctgaggaggtaggatctggtgcaggtataaggatctgggtctttcaatgtctgagaaggtaggatctggtacaggtgtgaggatctgggtctgttaatgtctgaggaggtaggatctggcactggtaagaggatctgcatctgtcagtttctgaggaggtaggatctggccctagtaagaagatctcagtctgtcaatttctgaggaggttggatctggcccccttatgaggatctgagtctgtcaatatctgaagaggtaggaatctggtacaggtatgaggatctgtgtgtgtgtcagtgtctgaggaattaggaatctggtacaggtgtgaggatcttcatgtctctgtatctgaggaagtaggatctgatacaggtattaggatctgggtctatgtctgaggaggtagcatctgatacaggtatgaagacctgagtctgtcagtgtctgaagtggttggatctggccctggtatgaggatctgggtttgtcagtatttgaggaggtaggatctgtccctggtaggagggtctgtgtcttctagtgtctgaagaagtaggatctggccctggtatgaggatctgggtctgtcagtatctgaggaggtaggatctcatacaggtatgaggatctgggtttttcaatgtctgaggaggtaggatctggcacaggcatgagcatctgggtctgaccatgtctaaagagttgaagctgtgtgcaggtatgaggccttgggtctgccagtgtctggggaggtgaggctgggcatgggtgtgagaccctgggtctgtccatatctgaggaggtaggatctggtatgagtatgaggatctgggtgtgtccgtgtctgaggaggtgggccctggcacaggtatgaggcctggggtctgtccgtgtctgaggaggtgggccctggcgcaggtatgaggccctgggtgtgtccgtgtctgaggaggtgggccctggcacaggtatgaggtcctgggtctgctggtgtctgcagagacagggcccgacatctcagggaagaccacggtaagctcttcagtttgtcttgtggctgtggtcagtcatctgtagtctgccctgttggtcttcccatgtgttgccagcacctgcctgctgccttgcttcctggaggtgggttgggccagggccctccgagacgcccctgtgcaagaccagggacagggtttccggcaggaggtggggggcggggtgtgccggccctccctcagcaccttgtcctgtctctcctagtgggtgggaggacgctactcgctgtggtcggccatcggactctccattgccctgcacgtgggtgagtgtgtttctgtgtcttgcagcccctgtgggagacagtgttgcagtctaaggtcggggtagggggcttgtgtccctgaacatcatgctgtcctcacaggctgctggcctctctgcagctggctgggatatttatttcatgtccagaaggaaggtctgggtttttttgcgtgtgcaagttggcccccgtctttgcccctcacaactgcagtcctgtttctctcctatcctaggcagagtcagatccctgcactcagggccacctctcactggaggggctttgtctaggtccgagtcctcccatgtcgtatcttctggctctccatgcagccttccttcgttgcagaaggagctgtgcccactgcccacaggacgcagggtgtggccacttctgttgactctgcttttgtgtcacaggttttgacaacttcgagcagctgctctcgggggctcactggatggtgagtgctgaggctggttctctgccaagtgctggccagaggcgcgtgtgttggtcctggtcccccgctttctcccccactgtcctgtccctcccctccccgtgcagctgctcagctcccactcatcctgctcctgtttcaggaccagcacttccgcacgacgcccctggagaagaacgcccccgtcttgctggccctgctgggtatctggtacatcaactgctttgggtgtgagacacacgccatgctgccctatgaccagtacctgcaccgctttgctgcgtacttccagcaggtaccagctgccaagccaggccttggagtcagcaagatttgtggggggtctgggaggtctaggaacctgggtttcagctcctccaggagctctttgccccattgcccttgggcctggccaaggtccatctgtgctccttgtctcaggatgaatctttgtaactgaggttggttccatttgagtgtcatctgagtttgatcaccatgggaggggcatgactggtgatcatggtgccctggctagggaggtcctggcttgactcaggggatgtttctcagctggggtcacttctttcttgcacatcactatgcatgcctaccatagtgtctgaggacgtaggatctagccctggtatgaggccctaggtctgttagtatctggggaggaaggatctggtacaggtatgaggacctgggtctgtccatgtctgaggaggtgggatttggccatagggtggggctgcaagctggaatcccttatagcctgcactgcctttatccctccagaaaagcaagtgtgtatctagtctgtggtggcctctttggactacatggccctcttctcccttgggatctccagagccccccgagaggcttagcaggccctctcctagtcacattatgtcccagaaagcttttccacacctgtccctgcttttttttttttgaacagattctcactctgtttcccaggcaggagtgcagtggcgcgatctcggctcattgcaacctccgcttcctgagttcaagcaattcctgtgcctcagcctcccgagtagctgggattgcaggcatgcaccaccttgcctggctaatttttgtatttttagtggaaacggggtttcactatgttgcccaggctggtttcgaactcctggcctcaagcgatccacctgccttggcctcccaaagtgctgggattacaggcatgagccaccatgcccaaccctatccttgcttttgtttagtacaaagccagtccctgtccagcagctcttgagttgctctgggcaggtacagaaggcttcaccaacacctggaagcaaatcctgtgactgaaggagaggccaaggttccccaaatcccagctgccttggtgagggttgccatgaccagggcccaggtgggtacccaaagcctagcatttagttgtggtgacagccctcaaaggctgtactcttagccaggcatggtggctgatgcctgcaatcccagcaccttgggaggcagaggctggggggaattgcttgagcccaggagttcaagaccagcctgggcaacgtagtgaggcccggtctctacaaaaaaaacccacaaaaactaacagtagccaggcatggtggtgcggcacctatagtcccagctacttgggaggctgaggcaagaggcttgcttgagcccaagaggtcgaggcttcagtgagcaatgattctaccactgtactccagcctgagtgacagagtgagactctgtctctttgggaaaaaaagaagctgtgcactctggaccccagcctgctctcccttaagaaatgagctgattttgtgaccgattttgtctttagggaggtccttgcctgacctccagacccaccttttcctgggcatgagtccttcctgcacagtggcttaagcaggaaaggttgggaggctgtgtcctcactggtgtggggaggaaggggatcgtgcctgtggacacgtgtgcaggtccacctcacggtgtcagggcagggtgggtctgcctggagcatctgggcaggactttggcatggtgcaggaaggagcaggatttgcgtacagtgtgtgaaggatcaagacttgcaggaagagggttgggttttttttctttcttttcctttcttttcctttttttttttttttctttttttttgagttggagttttgctcttgttgcccagtctggagtgcagtggcatgatctcggctcaccacaacctccgcctcccgggttcaagcgattctcctgcctcagcctcccaagcagctgggattacaggcatgcgccatcacacctggctaattttgtatttttagtagagacagggtttctccatgttaatcaggctggtctcaaacttccaacctcaggtgatccgcctgccttggcctcccaaagtgctggaattacaggcttgagccactgcgctcagcctctttctttctttttaaatgttctttcattttgccaagaactgggtttctgttccttttccagggcgacatggagtccaatgggaaatacatcaccaaatctggaacccgtgtggaccaccagacaggccccattgtgtggggggagccagggaccaatggccagcatgctttttaccagctcatccaccaaggtaggcccctgtggcctgggaagggtgatgttgggggagggaaaggatcttccagaagagatatctcacttaggtcagtgccctcctctaggccatatggctagctcccatgggctggggtcatgtgggtgaccacagtgcccttcacaggcaccaagatgataccctgtgacttcctcatcccggtccagacccagcaccccatacggaagggtctgcatcacaaggtaagagcccccatctggccccatctggggggtctggctcacattgcacccagacctctgaaaacctggtgcattggttggcaatcacgttagttttctattcctgccgtaacaaatgataacaaacatggaggcttaaaacaacactcttcttttgtggggtggggaggggggacagagtcttgctctgtcgcccaggctggagtgcagtggcacgatcttggctcactgcaaccttcccctcccggcctcaagtgattcttatgcctcagcctcccaagtagctgggactactggcactcaccaccatggccagctaatttttgtagttttggtaaagggggggtttcactatgttggccaggctggtcttgaactcatgacctcaagtaatctacctgcctcggcctccctaagtgctgggattataggcatgagccaccttcctgggctatctgaagagtttctgaagctcaaatatccagcaggccctgatgtgtctctgcttagagtcttgcaggctgaaatcaaggtgtcatcaggactgtgtttctttctggagaccttaggggaaaagcctttgacctgcttgtcaggtggttggcagaattcatttctctatggttgtggaactgaagtccagcttccttgctgtgggctgaaggtcgttctcagattctcagaggtcacctgcatcctctagcttgtgggcctcttcactgcagaaccagcaatggcaggttaaatccttctctgaagctttgattctgtcttgccacttctgttgcatctctctgacttgtttaccttcctcttctacattttgcttttgttccctaagtgacagtgtcatgctgtgttgtctaggctggacttacagtggcatgatcacagttcactgtattctcaacgtcccaggctcaagcagtcttcctgcctcggcccctcaaatagctgagacttacaggcactaacaggcacttacaggcacttacaggcactaacagcctggctaactgttaaactttttgtagaggccagatttcactatgttgcctaggctggtctccaactcctgggctcaagtgattctcctgcctcggcctcccaaagttttgggattacaggcatgagctaccgtgcctggccctcttttacttttaagggccagtgtgattagattggggctactagataatccaggaaaatctccccttttgtttattttatttatttattttattttagagatagcatgtcactctgttgctgaggctggagtgcactggcccaatcatagctcactacagccttgaactcctgggctcaagcaatccttttatctcagcctcctgagtagctgggaccacagatgtacaacatgcctggctaagtttttttttttttttaaagagacagagtcttgctctgttgcccaggctggggtgcagtggcacaatcaggctctctgcagcctcaccctcctgggctcaagcaatcctcctacctcagcctcctgagtagctgggaacaggcacacgccaccacacccagctgatttttttatttttattttttgtagagatggagtctcagtatgttgcccaagctgccctcgaactccttcagagaatttactgtgctttgtctcaggtgtgcagagcagcacagggttacggtagcacaatcttgggagtcagtgagctggattgaattctgattgttcctgtctatagttctgtgatccagcactgtggacttgtggaacccaaggctctactagaacagggcgatgatgcctttcctccttaggatcttagtattatttttttttcgagacaccgtttcactttgttgccccggctggagtgcagtagtgtgaccttgactcactgcaacctcagcctcctgggttcaagtgattctcgtgcttaagcctccggagtagctggaattacagttgcacaccaccacgcccagctaccttcttaggatcttaaaagatagatgttggtaaaattgtgagcaggacccctagcaagtggtgtgtagttctttttttttttttgagatggagtctaggtctgtcgcccaggctggagtgcagtggcgtgatcttggctcactgcaccctctgcctcccaggttcaggtgattctcctgcctcagcctcctgcctgatgacaggcatgcgccaccatgcccagctaaatttttttttggtatttttagtagagacgggtttcaccatgttggtcaggctggtctcgagctcctgacctcgtggtccatccgcctcggcctcccaaagtgtcgggattacaggcgtgagccaccgcgcctggccactggtgtgtagttcttaaagagcagttatcactgttccctgccttgtggtgtcatcggatgtgtccccctcgctccaactgagctgtacagcgagtgacccaggctgggactgacccctgctgagaagtaccaggcggtcttgtccctctgcctgaagcccagacagtgctctcaagcataactgatgtctcgctcatcagatcctcctggccaacttcttggcccagacagaggccctgatgaggggaaaatcgacggaggaggcccgaaaggagctccaggctgcgggcaagagtccagaggaccttgagaggctgctgccacataaggtcagcacttctgcatttggctttggggtgcatgctggagttggaggtgtgaagctatggcaccaggcaggggcttggggcgtgcctggcttgtcctacagaatgggagggcctgtcctcacagacctgcacgtctcagcctctggggcagggtgtgcttcccttcaaggggtttagggatcaggactctcttggagacattccttggtgttttctgcaggtctttgaaggaaatcgcccaaccaactctattgtgttcaccaagctcacaccattcatgcttggagccttggtcggtgagtgagtaggggaaaggtcctggcttggggtaggttggaatgggcttgtggagccctgatgtgccctgtctgtcacttctgcagccatgtatgagcacaagatcttcgttcagggcatcatctgggacatcaacagctttgaccagtgggggtgagttgctcacttaggggagggccgggaatacctttgtgtcggctcagggatttcagtagcaacgttagagccttcctcataccactcttcccttcccttcccttcttggcagagtggagctgggaaagcagctggctaagaaaatagagcctgagcttgatggcagtgctcaagtgacctctcacgacgcttctaccaatgggctcatcaacttcatcaagcagcagcgcgaggccagagtccaataaactcgtgctcatctgcagcctcctctgtgactcccctttctcttctcgtccctcctccccggagccggcactgcatgttcctggacaccacccagagcaccctctggttgtgggcttggaccacgagcccttagcagggaaggctggtctcccccagcctaacccccagcccctccatgtctatgctccctctgtgttagaattggctgaagtgtttttgtgcagctgacttttctgacccatgttcacgttgttcacatcccatgtagaaaaataaagatgccacggaggaggttgtaggctcagcctctgattttttttttcctgtgatggtgctttatgtagcagagggcaggagcgctcagcaggacgcaggctgtgcctctgcggacacttaacactaagtggtgagcgggtctagagtggagcaaggtgccctgagaagacaatagtggggtgggggcacaatcagtcaggacggcaacttggcctgtgtcaccaaatcccaagactgttttccactcctcacctctgtgactgcagaaattggatactctgttcactcgatggttctaaaaactgcattgagattatgtttgtttcgggtgaattcctggacaagaccgaggatgactgccatctcctggcaagacgctcaggtagttcttttgctttaaaaggcagatattgaaaactggaattttttttttttgagtctcgctctgtcacccagactggagtgcagtggtgcaatctcggctcactgcaacctccgcctcccgggttcaagctattctcctgcctcagcctcccgagtagctgggattacacggcgcacaccaccatacccagctaatttttgtatttttagtagtgaaggggttttaccatgttgggcaggctggtcttgaactcctgacctcaggtgatctgcccgcctcagcctcccacagtgctgggattacaggtatgagccaccacgcccggcccattttttttttttttttgacaacttttttttttttttgagacagggtcttgttccattgcccagactggagtgcagtggcatgatcacagctcactgcagccagtaatcctcttgcctcagcctcccaagtagttgagactacaggttgtaccactatgccctgctagttttttcattttttgtagagagacgggtcttttttttttttgagacggagtctcgctctgtcgcccaagctggagtgcagtagcacggtctcagctcattgcaagctccgcctcccaggttcacgccattctcctgcctcagactcctgtgtagctgggagtacaggcacctgccaccatgcccggctaattttttatatatttttttagcagagacagtgtctcactgtgttagtcaggatggtctcgatctcctgacctcgtgatccgcccgcctcagcctcccaaagtgctgggattacaggcgtgagccaccgcgcccagcaaggcgggtcttgctgtgtttcccagactagactggtcttgaattccagggctcaagagatctcccacctcagcctcccacagtgctgggattacaggcgtgagccgccacacccagcctattcaaaatttttttttcttagagacagggtctttgttgcccaggctggactgcagtgatacaatcatagctgactgaagcctcaaattcccaggctaaggtgatcttctcacctcagccttccaagtagctgggtccgcagatgcatgccagtacacccagctcatttaaaaaaaaatttttttcttttttgagagtcttgctttgttgcccaggctggagtgcagtggtgtgatctcggctcactgcaagctccacctcccggcttcacgccattctcctgcctcagcctcccgagtagctgggactacaggtgcccgccaccacacccggctaattttttgtatttttagtagagacggggtttcaccgtgttagccaggatggtcttgatctcctgacctcatgatccgcctgctttggcctcccaaagtgctgggattacaggcgtgagtcaccgcgcccggctcattttaaaatttttgtagatcagtgtactgttgtaaaaaaaaaaaaataagaaaaataaaaaataaatttttgtagtgataggatcccactgaggccagagaatagggtctggagacaaaggagcattcacttcagcctctgactggtggcaggccaagtctttatttacatagggtgtaaccaaataggaaacctctaaagggtacttaaaccccagattttctacacagggcacttgcttgagcctcatcccgctttctggaatgtacttttgcttcaataaatctgtgcttttgttccttcttttgttgctttgtgtgttttgtccacctctttgttcaatattccaagaacctggacgacttgtagtcaagatcctcccctggtaatactactgtgttgcccaggcttatcttcaactcctgggcttaagagatcctcctgccttggcctccgaaagtgttgggattacaggcgcaagccactgtgcccagcatcacagggccttttaaagctatcaggatgaagtgtggtaaaaaaaggagtaaatgggtttcatctccagatccttgctgggctagagccaaacctcacaaaggctggtgcttcctcctttgaggtgtaaatccttgaaaacattcatttcttttgcataccacgttatgaatcctaaaataatgtttttgcagcctgcatttttaaaaagtcaggtttattggggtgtgatttacatatagtaagattcacctttctttggtatacagttatgagttttcacaagtgtatatacagtcttagaaccattacagatgagatatacagcattttcctcaccctcaaaagttcctgacacttgtggtccagtcctactccctcatcccaactcctgactaccattgaactgatttttttccctccgaagttctgcgtttaccagaatggcgccttttgtgtctggcttcttcccatgatgcttttgaaattcacccatgttgtgctgcaggaattgaaaaaactgtattgtgtggctgggcgcggtggctcacacctgtaatactaacactttgggaggccgaggtgggcagatcacttgatttcaggagctcgaaaccagcctggccaacatggtgaaaccccgtctctactaaaaatacaaaaaaggccgggcatggtggctcacgcctgtaatcccagcactttgggaggccaaggtgggcggatcacctgaggttgggagttcgagaccagcctgaccaacatggagaaaccccatctctattaaaaatacaaaattagccaggcatggtggcacatgcctgtaatctcagctactcgggaggctaaggcagaagaatcgcttgaacctgggaggcagaggttgcagtgagctgggatcacgccagtgcactccagcctgggcgacaagagcgaaactccgtctaaaaaaaaaaaaaaaaaaaaagccgggcgccgggcgtggtggtgggcgtctgtaaccccagctactgggtggggctgaggcaggagaatcacttgaacctgggaggctgagatgcagtgagatggcgccactgcacttcagcctgggcgacccagcaagactctgtctcaaaaacaaaacaaaacaaaacaaaaataaaaactgaaaaatctcaaacatataaaacccaaatagaataaatctccatgtgcctggcaccaaatttcaacaattatcaactcatggtcaatcttactgtatttacaccccaccaccttaattatgtagtagcaaatcggaggtatttcatctataagcattttggtgtgtttctctaaaaattaaaaactttaactttttaaaaaactttattgttcttgttaatgactgataataccattatcccacctaaaatttttattttccgggaaggcttttttctggtggctcacacctgtaatcgcaacactttgggaggcggaggcgggaggatcgcttgaaccccaggagttcaagaccagtgtgggcaatatagcaagtcctcgtctcaggaaaaaaaggaaaaaagaaagttagctttttggcaaaactacttcctagtagatggtgtgtacttcctatcacagcgcattaaggggcacataatgcctgggactccgggatttcgagcccctgacgccagcggcgcctctgtggctctgggacctgagcgcacgcgccttaaagccacgcctccgcatcggatcctagtaagggagcggggttatcattttagcgtagcgttgcgcgtgcgcagagaggccgccgtagtttgcgttttcacctggtcgcccggcggccatggcggccgttctgaagccggtgctgctgggccttcgagatgcgccggtgcacggcagccccacagggccgggtgcctggactgctagcaagctgggcggcattccggtgagggcgggtgccggagctggggtcgatgggtgctgctgaagggtgcggagggagtgggcgaggtcctggggggagtcggggtctgagcgcctcctctgtcccctcaggatgctctgcccaccgtggctgcgcccaggcccgtgtgtcagcgctgcgggcagccgctcgctctggtcgtgcaggtgtattgcccgctggaaggctccccgtttcaccgtctgctgcacgtgttcgcgtgcgcctgccccggctgtagcaccggcggtgcgcgcaggtaggcggggaagtcccagagctgctccaggggtgtcctttccagcgggctggggcgggccggcgggctggagtcggggtgcagccctcacggccctttgtcttcaccccgaagctggaaggtgttccgctcccagtgcctgcaggtgccagagagagaggcgcaggacgctcaggtaaaggttgtgattggcatgttattgtttttctgtcatttgaggatattttccagagaatagtttggggcagactttaaagccgtgttctttgaagtacactggagtgttttttgcttttctgaagaaccataaaatgctattttcgtaaagtttttttttttttttttttttgagacggagtttcgctctgtcgcccaggctggagtgcaatggcgcgatctcggctcaccgcaacctccgcctcccaggttcaagcgattctcctgcctcagcctccctagtagctgggattacaggcatatgccaccacgcccggctaattttgtatttttaatagagacggggtttcgccatggtggtcaggctggtctcgaactgccgacctcaggtgatccacccgcctcggcctcccaaagtgctgggattacaggcatgagccaccgcgcccggcctttcttaaggttttgtgagagttttttttttcttctattttactttatttttattttctaactcctttgttaaaaggagatggaggcccagcatggtggctcacgcctgtgatcccaccgttttttgagaggctgaagtgggaggattgcttgagctcagaagttggagaccaggctgggcgcggtggcttacgcctgtaatcccagcactttgggaggccgaggcgggcggatctcctgaggtcagaagttcgagaccagcctggccaacatggcgaaaccccgtctctattaaaaacaaaaacaaaaaattagccgggcatggtggcagacacctgtaatcccagctacaagggaggttgaggcaggagaatcgcttgaacccgggagacagagattgcagtgagctgagatcatgccactgcactccagcgtgggtgacagactccgtaaaaacaaaacaaaacaaaacaaaagaaaaaaaaaacgttgggagagcagtctgggcaacatagcaaaacatcgtctctataaaaagtaaacaaattagccaggcatgatggccacgcaactgtagtgccagctactcaggaggctgaggtaggaggattgcttgagtctaggaggttgaggctgcagtgacctacacttgtgccactgcactccggcctgggccacaaagccagaccctgtcccctgccaaaaaaacaaaagggagatggagacttcctcctggatttcttcaacttttttttttaactgtaaattgacagtttataataatgtataaatttatgaggtataaagtgatggctatgattcatgaatatcatgtggaataattaaatgaagctagttaatgcattcatcacctcaaatacttaacatcttgtgagaacatttgaaatttcctctagcaatttggagatacacaatactcttatttttttttttttttgagacggagtcttgctctgttgcccaggctggagtgcagtggcgccgtctctgctcactgcaagctccacctcctgggttcacaccattctgcctcagcctccagagtagctgggaccacaggcgcccgccaccacggccagctaattttttcatttttttaaatttttagtagagacagggtttcaccatgttagccaggatggtattgatctcgtgaccttgtcatccacccacctcggcctcccaaagtgctgggattacaggcttgagcccctgtgcccagccacaatactctattattaactatattcatgctgtgcagtagaacttaaaaaaaacccacattcctcctgaataactgaggttttgtattctttgaccgtcatctccttattcttcccgctccaggtttctttcttcctttttttttttttttttttttttgagaccgagtttcgctcttgttgcccatgctggagtgcaatggcacaatctcagctcactgcaacctccacctcccggatgcaagcgcttatcctgcctgcctcagcctccctagtagctgggattacaggcactcgccaccacgcccagctaatttttatatttttagtagagaaagggtttcaccatgttggccaggctggtcttgaactcctgacctcaggcaacccacccgcctcggcctcccaaagtgctgggattacaggcgtgagccaccatgcccggctcactccagatttttttttttctttgagatggagtttcgctttgttgccaggccggagtgcagtagcacaatcttggctcactgcagcctccgcctcccaggttcgagcaattctcctgcctcagcctcctgagtacctgggactacaggcacacaccaccatgcccagctaatttttgtatttttagtagagatggggtttcaccgtgtagccaggatggtgtcgatctctttacctcgtgatccacccgccttggcttcctgaggtgctgggattacaggcgtgagccaccacacctggccactccagatttctttaaccaccactctactctctacttctttgaggttgttttagattccacatataagtgaatacatgcagcatttgtctttgtgtctggcttatttcccttagcaaaatgttctccagttccatccatgttgtcacaaatgacagaatttcctttttttttttaagggtgaaaaatattccattgtatatatagtagtttttttaaacttacactgaaggtcttgagacacacagtttactgattttcctgtttgggaatatatatgggtgtgtacatatatgtggttgtatgtgataatgtatacgtgtctttatagtaaatatactttatgagagctatatatgtattaacacatttcataagatgaaatctgaatttattgaaaaggcaggcaagttggtagctgcagaacacaatttagcctccctttgactgtaaatgtgtctttatatatacactgagtttgtttgtttgtttgtttgttttttgagatggggttgcattctggtcacccaggctggagtgcagtggcatgatctctgcctcttgggcccaagccattctcccacgtcagcctcctgagtagatgggattacaggcacgtgccaccatgcccagctgattttcatattttttgtatagatgggattttgtcatgttgcccaggctgttcttgaactcctggactcaaacagtccgcccacctcaacctcccaaaatgctgggattacaggcgtgagacactgggcccggcctgcacccagttcttgatgtttgctaggcatagtattagcagtacttaaataaaaagttgaagacagtggtgtttgcctatatttgtcagggttcaggtgcagataattagaaaagtgctgttgctttttctttttttttttgagaccgagtgtcgctctgtcacccaggctggagtgcagtggtgtgatcttggctcactgcaacctccgcctcccgggttcaagcgattctcctgcctcagcctcctgagtagctggattacgggcacgtgccaccatgcctggcttttaagctgagacagacttaacacaggagtgaggtttttagtaagtggataggctgaaggaggaggctccaggaatgccctccagaatcacacctcagaactggccgtgaaggagctgctatgccacctctcctgctgtcaggaagcttaggtgtgatctggtgaactagaggctgtctttgccaccgaaccgttggctccaaagccttgttctgtctgtgtctacacaatggctaccttttgctatgtggtctttctttctacttcactctgtctcaagttcatgtttctctctagtagacctgattagcagacccctaatcatatctgaaaccctagctgctaaggggtctgggaaaggtagttctttcttttcagttcctgcaatacatgaagcacaacagaaagatattggaacggatggttgaataacccctgtactatatctgtcacactcaccccaaaaaggaaagacaagtattttaagtcacctccaacgtgcttttgagtacatagggtctagaaagtttgattggagtgtaccagaggggaaggggatggtgtgaaggctccctctggaaggcgcggcggtgggtggctggagccgaaggattagaataaacctcccaaatgtgctcggacctcattcactgagtatttttccagaaacagggaaacagccttgcagctgaggactggtgtgaaggtgctgatgactggggaagtgatactgaggaggggccttcaccacagtttaccttggattttgggaatgatgccagcagtgccaaagacgtagactggactgctcggctccaagacctccgcctgcaggatgctgtcctgggtgctgcccatcctgtgcctcctgggctgccgctcttcctgccctactacatctgtgttgcagatgaggatgattacagggactttgtcaacctggatcatgcccacagccttctgagggactatcagcagagagaaggcattgccatggatcagttgctttcccaaaggtgaggatgtgtgctgctgaggttgagaggtgactggattgggaagcagccacaagagttacccttcagtttcaccacaggacctggggaaactttcaggcagaacttgtatgtaggacctttttgcttcacttccttatcagccaacttgagttagcttgaaaaccctgctctatttataattgccgttaagaaagtgaagatgaacaaacagaagttagagatggcaagtatttatagaagacgcgttcactgactcttaaattttcttttatatttctaatatgtctttatagcagagacaggcaagttagaaaactaccatttgatctgggataataagattggggtgaaaaaatggaaaaaggaaaagaaaaacgccatttgtttattgactcttggctgtggctccagaactggcccaggacctcagagatgctttcagatcctcaattctgtaaaatgagagtgatggtgatatctctgttctctgtttcatcccatgattttttgagagttaagcgagagggtagatcttgaaaggctttataaaccaaagctctctaaagaggtaagaatgatcatttttgcttattgattgactgagagagacagggtctcactctgtcacccacgctggagtgaattggtgtgatcaaagctcatgcagccttgaactcctgggctcaggcaatctatcttagtttcccaagtagctgggagtacaggtgcacaccaccatgtctgaccaattaaaattttttgagtttcgctgttgttacccaggctggagtgcaatggcacgatctcggctcactgcaacctccacctctcaggtttaagcagttctcctacctcagcctcccaagtagctgggattatagccatgtgccaccatgcccagctaatttttgtatttttagtagagatggggtttcactatgttggtcaggctggtctcgaactcctgacctcaggtgatccacccacctcagcctcccaaagtgctgggattacaggcgtgagccattgtgcctggcctaaaaatttgttttagccactgcacccagcattttttactattagaataaaaaaattacaatagaatatttggagaaatggcctggttctttaccagaactgtttcatttgtaggctttttcagaataatgatgaaggggaatgcatgaagacatgttggtgtttgaaaataatccttaatagaattgatggttataaggactttttattttttatttatttatttatttatttatttatttatttttgtgtgtgtgtgatatgggctctcttgccaggctggagtgcagtggtgcgatctcggctcactgcaacctccccttcctgggttcaagcaattttcttgcctcagcctcccaagtagctgggactacaggtgcgcgccaccacacccagctaatttttgtattattagtagagacggggtttcaccatgttgaccaggatagtctcaatctcttgacctcgtgatccacctgccttggcctcccaaagtgccgggattacaggtgtgagccaccgcgcccggcaggattttttattttttaatttcttaagtttttatgtatttgcttatttttggtgggtttcttcagactagagtattcttcttttttttttttttttttttagagatgggatcttgctttgtttcccaggctgaactgcagtggtgtggtgtggttatggccttttttttttttttttgagacagtcttgctctgttgcccaggttggagtgcagtggcacgttctcggctcactgcaacctctccctcgccggcttaagcagctctcatgtctcagcctcccgagtagctgggaccataggcgtgcgccacttcacccagctaatttttgtattttctttttagtagagatgggcttttgccatactggccgggctcttcttggagttctggccccacgtgatccgcccacctcgacctcccaaagtgccgggattacaggtattagccaccacgcccagcctgctcatggtttactgcagcctcaaactcctggcctcaggggatcctctggcctcagctttccccatagctgggactacaggtgtgtgccaccaaactcagctaattaaaaaaatttttggtttttttgagacagagtctcactttgtcacccaggctggagtacagcggtgtgataatggctcactgcaacctccagctcccagtttcaaatgatcctcctgcctcagcctcccaagtagctgggattacaggtacccgccaccacacccggttaatttttgtatttttagtagagatggggcttcaccatgttggccaggctggtctcaaactcctaacctcaagtgacccactctccttggcctcccaaagtgctgggattgcaggcgtgagccaccgcacccagatgaaaaatacatatatatatatatatatataaaataaataataaaatatatatattaaaaaatatatatgaaaatatatatatttgagacagaatctcgctctgttgccaggctggagtacagtggctcaatctcagctcattgcaacctccacctcccaggtttaagcaattctcctcccttagcctcctgaatagctaggattacaagtgcataccaccatgcccagctaatttttgtatttttagtagagacagggtttcaccatgttggccaggatggtctcgatcttttgacctcgtgatccacctgcctcggccttccaaagtgttgagattacaggtgtgagccactgtgccctgcgactttttaaattgtaaataattactcaagagttgaaaatggcttgggagaagggttgggcagggaactgcagagctacatgtacacaatttaaatatcaaaaatatttacttgacagtttttggctgagtgcggtggctcactcctataattccagcactttgggaggccgagatggatcacttgaggtcaggagttggagaccagcctggccgacgtggtgaaaccttgtctttactaaaaatacaaaaattagctggacgtgttggcgcacacttgcaatcccagctactcaggaggctgaggcaggagaattgcttgaacccaggaggtggaggttgcagtgagccaagattgcaccattgcactccagcctgggtgacagagggagactccctctcaaaaaaaaaaaaaaattacttgacagttttacagttttttaactttgacagtttttttttttttttctttttgagacagggtctcacactgttatccaggctgtagtgcaatggtgtgctcacggctcaccacagccttgcctctggaatagccgggaccacaggtgcatgccaccatgcccagctaatttttgtatttttttgtagagacaaggttctgccagattgcccaggatggttttgaactcctgagctcaagtgatccgcctgcctcggcctcccaaagtgctgggattacaggcgtgagcccactgcactggcctgagaaatttttttttgagacggagtttcactcttcttgcccaggctggagtgcaatagcgcaatcttggctcactgcaacctccatctcctgggttcaagtgattctcctgcctcagcctcccaaggagctgggattacaggcgcccgccaccacgcctggctaattttttgtacttttattagagatggggtttcaagatgttggccaggctggtttcaagctcctgacctcaggtgatctgctcacctcggcctcccaaagtgctgggattaaaggcgtgattgattttttttttttttttttttttgagatggagtctcattctgtcaccaggctggagtgtagtggcatggcacgatctcggctcactgcaacttccgcttcccgggttcaagcgatttcctctgcctcagcctgctgagtagctgggactataggcgcaagccaccatgcccagccaattttttgcattttttagtagagatggggtttcaccatgttggccaggatggtctcgatctcctgaccttgtgatctgcctgcctcggcctcccaaagtgctgagattacaggcgtgagccactgcgcctgccctgataaaattttttaaaagaaaattatcttgttttgtcttgcaaatgctgtaattttctggatatagacattcaaaagtgttttctgcttctgtttttagccttcctaatgatggtgatgaaaaatatgagaagaccataattaaaagtggagatcagacgttttacaaattcatgaagcgaattgctgcttgtcaggagcagattttgaggtaaaaaaaggcacagttccttttattgttttccttgattataaaggaatacatattagtttggaaaacacaggaaaatatgagaaaagcaaaacctacagtattccccaaaccaagagagaacctaatacctgctttataggacctaatacctactttataggatgtgtaggaggattcagtaaggtaaagtgcactcacttgtctaacaaatacttacgaagtctattctgcatgccagttgctggtatttgtaggtgctgcagatatagcaagaaacggcacagatgaagtccatgttctcatagcctttattattattattatttaatttttttttttctttgagagggagtcgcgctctgtcgcccaggctggagtgtagtggcgtgatcttggctcaatgcaacctccacctcttgggtttaagccattctcctgcctcagcctcccaagtagctgggattacaggtgcccgccaccctgcccagctgatttttttgtattttagtagagatggggtttcaccatgttggccagactggtctcgaactgctggcctcacgtaatctgcccacctcagcctcccaaagttctgagatacaagtgtgagccaccatgcctggcttttttttttttttttttttttttttttgggggcagggtcttgctctgttgctcaggctggagtgcagtggtgtgatcaatcatagctcagtgcaccttgacctcctgggctcaagtgatcctcccacttcagcctcccaagtagctgggactacaggcatgtaccaccatgcccaactaatttttgtatatttttttagaaatggtatttcaccatgttggccaggctggttccaaacttctgggttcaagccatccacctgccttggcttcccagagtttgttctaggattacaggcatgagccactgtgcctggactattattattattaaaaaaatatttttttagagagagggtctcagtctgttgtccaccctggagtgcagtggcgtgatcattgctcactgtaacaactacctcttgggctcaatcgatcctcccaagtagctagaactacaggagtgtgccaccatgtttggctaatttttaaaaaatgtattttgtagagatgggatctgatcatgttgcccagtctgctctcaaactcctggcctcaagtgatcctcctgccacggccttccaaagtgatgggattaccggcatcagccacgacccttggcccatatatttatttttattttttaatttatttttatttttctgggatggagtctcgccctgccacccaggctggagtgcagtgacgtgatcctggctcactgcaatctccgcctcccaagtttaagagtctcctgcctcagcctcccgagtatctaggattacagcgccaccacgcctgactactttttgtatttttagtggagacggagttttaccatgttggtcaggctggtatcgaactcctgacttcaaatgatctgcccgcttcagcctcccaaagtgctggagttacaggcttgagccactgtgactagtgggggagattaaaaacaaacctgtatgattcccataagtgataaatgaggaaaaaatagagctattttaggtaggctatcagaaaggcctcagaggaaatgacatacccagcaggtataatttataaaaatagccacatagtaaaaacaggtccagacaaagtgggcagaattagctcaaatggtctttttccccgatacctaccacagtgaatctaaaagctaaaaatcaggccaaataaaataaatattaaaaaagaaattcccttgtatcagcactgaacaaaggaaaagggcttagtaccataaaactcaaagtgatagcccaggatataatatccataaatgtctagtagagttcttgagtgtttaacatatatatttattcacttatgtaactaagttatctttgcagagaaaggtacagaaatttccggcatggttaagtgcaagttctaattccacaggccttttctctcacctgcctaaaatatactgatgagtccacaaagaattttcttttttcggaaacggaatctgtctctgtcccccaggctggagagcaatggtacgatctcagctcactgcaacctccattttctgggttcaagcaattctcctgtctcagcctcctgagtagctgggactacaggcatgtgccaacatacccggctaatttttgtatttttattagagatgaggtttcaccatgttggccaggatggtctcgaactcccgacttctggtgatccacccacctcagcctctgaaagtgctgggatggcaggtgtgagccaccatgcccggcctaagaattttcagttaataatattatgtctggaaggaagcacacaggaggagagtttgcatctcctaatgtggaggatggtggacccagctgttggctgaagaactgggtgtggtggggaggtggtgtaggaaaggacggggattgcctctcagaagcaacattcctttgttccatgagtcagagcaatgattggaaagttaagagcaatttcgcctccattcgagtgggatctttctcaacatacagcattttacactgtctcagaggaaaaagcaaagcccaggtattctaataaagattgcatccagtcccagaagaactatctcctcaccccagtttcctcttttaccacctacagaaatgtagaggaaatggacagtactcttagagagaggaaaacaggcctcatatgagatggacaggaaatcaatgagaacctctgcagacatttcagagcaaatagatggtcttaactgagttgccccctttaggtgtgagctagatgaaaaatagcatgccacccaggtaatcatactgtggcaagaacagttaaggaaatgaagagaacatagaaaaggctcaagaaccaagtctgccagaaaatataatccagctggactcggtggctcacgccagtaatcccaacactttgggaggccgaggcgggtggatcacgaggtcagtagatcgagaccattccagccaacatggtgaaaccctgtctctactaaaaatacaaaaattagccgggcgtggtggtgggtgcctatagtcccagctgttcaggagactaaggcaggagaatcgcttgaacctgggaggtggaggttgcaatcagccgagatcgtgccactgcactccagcctgggtgacagagtgagactctgtctcaaaaaataaaataaaataaaatataatccaaggagcacatcagtcccagcagatgcttcaaaatgtataagaacttcataagaatggattccataaaacaagagctcaaaggtgagaaaataaagtaactatgtatgaatcggaaattgaattgctaaagaaaccaagccccatgacattacatatctaatacatatagaatataaggaacactggccgggtgtggtggcttaagcctgtaatcccagcactttgggaggccaaggcaggcagatcacaaagtcaggagttccagatcagcctggccaatatggtgaaaccctgtctctactaaaaatacaaaaattagctgggtgtggtggcgggtgcctgtagtcccagctattcgggaggctgaggcagaagaattgcttgaacctggcaggcggaggttgcagtcgaccgagactgcgccattgcactccagcctgggcgagagagcaaggctttgtctcaaaaaaaaaaagaaaaaaaaagttaaggaacataatagacttggctaaagatcaaagtactggtatagaggaaagacttgagctaatccagtgaatgcagaagaaaaagagaaagcattcagagagaagatggtatctttgaagggttgataaatatatttactatgaggagaattggtgtccaaaatagagaacgcaatagatggatcagaaactattcaaagataaaattgggaatttttccttaatgaaataagaactaaatatgcaaatactaaaatacagggagtataagaatagttgacattgagaaacctagcctggtggtggttttaaaaatatcgtcagtcttttaaatgtagccattctagtaggtggtggtggtggtatttccttgtggtttgaatttgcattttcctaataacaaatgatgttgtgcatctttccatatactcatttgacatctgtgtatcttctgtagtgaagtgtgtctgtttacatttatttttcagcagctttattgagatacaattgacatacaacagactgcgtatatttttacagtgtgcactttgataagttgacatccatatacacccctgaaatcacaacagtcaagacagtaaacatattcctctctgccaggagtttcctcatacttcttcgcaagttcttgcctaccctgtcctgtgctgctcccctagtccccaggcaaccgccaatcatctttctgttgcaccttagtgcatttcctgtgaaagtatataaggtcatatgggatatactttttttttttggtctggttttattcacttagaatacttcaagattcattcttattgcatgtatcaatagttcattccttttgaccgctgtgtcgtattccattgtatggatgtgccactatacatttaccagttgatggatatttgggttatttccagtgtttggctattataaataaagctgctgtgaacatttgtttacatctctttgtaagacatgttctgattttgggggggtagatacctaggaatagaacggttgtattatatgggatatgcatgtttaacttgttaagaaacaggccagttttccaaagtggttatgccatttctattcccactagcagtttttaagaattctacttcctgtatatctttgctaatgcttgggatgttcagtttttaattttagccatttaagaaggtgtgtagtggcattttattgtggctttaatttgcatttccccaaatggcaaatgatgttgagcatcatttcaagtgcttgttttccatctctgtatatcatcttggataatgtgtcattcaaatctctcaccatattgtttgtgttactgagttgtaggaattcttcatatggtcaagagtacaagtcctttttcaatttaattttttttagcactcaaacagattctgacagatggctttaaattttgatcaagttcaacttaacagttatggtttttttaacacggaatatgcagtccctttaatgtaatcattggtattgttgggttaattgttttttgttttttgttttttttttcttgagacggagtcttgctctgttgcccaggctggagtgcagtggcacgatcttggctcactgcaacctctgcctcccaggttcaacgattctcctgcctcagcctcctgagtagctgggattactggtgcgcaccaccatgcctggctaattttttgtagtagagacaggtttcgctatgttggccaggctggtatcaaacttttgacctcaggtgacccgcctgccttggcctcccaaaatgctgggattacaggcatgagccaccgcaccccaccatgttgggttaattttattctgttattgttttttcctccatttccttttttttttttttaaagagatgggtgtctcactatgtggcctaggctggtcttgaactcctggactcaagcagttccctcacctcagcctctcagcttctcaaagtgctagggttataggcatctgtcaccacacctgactttccatttggtggggtttttttgtttttgtctctgtattccttttatttaacctgcttgtcagtgactttgagtatttttagtttactattttgttccttttttgtcttttatttttaactctttatgttgctttttttttttttttttttttaagagattgggtcttgttctgttgcttgcgtaggctggaatgcagtggtgcagtcatggctcaccgcagcctcagactcctgagctcaagtgatcctcctgccacactctccaaagtagctgggaccacaggcgtgcaccactatgtctggctaatttttgtattattacactatgtctggctaatttttgtattattattattattcgagacagagtcttgctctatcatccaggctggagtgcagtggagcaatctcagttcactgcaacctctgcctcccaggtttaagcgattctgcagccgcggcctcagcctcccccacagctgggattacaggcacctgccactacgcccggctaatttttgtagttttagtggagatggggtttcaccatgttggccaagctgatctcgaactcctgtcctcgagtgattcacccgcctcagcctcccaaagtgctgagattacaggcctgagccacggtacccggcctaccttgtccactaggttttttttttggttttttttttttacatattcattactggtattttaaagtttttgtctgataaatttatcatcttgtccatgggtctccttgcattaactttctttatggggtaaattttcctgcttctttgcatgtttagtaacttttaaaatgatttaccagaaattacatatcgaacaacagtaatattgaagtgagctggatgtggtggctcacacctgtaatcacagcactttgggaggctgaggtgggaggatcacttgaggccaggagtttgagaccagtctgggcattatagcaagaccctgtctctacaaattttttttttaaaaactagctgggtatggtgatgcgcctctgtgttcccagctactcaggaggctgaggtaagaggattgcttgagcccagggggtcaaggctgcagtgagctgtgattgtgccactgcactccagcctgggcaacagaaaaaggctttatctaaaaaaaaaaaaaaaaaacccaaaaactgaagtgaatgtttcctccctctaaggcagaggtccccaacctttttggcatcagggactggttcatggaaggcaattttttcacagactgaggtgggggatgtggggcatggttttgggatgaaactgttcacctcagatcataaggctttagattctcagaaggagcacacaacctagatcccttgcatgtgcagttcacaataggatttgcgctcctatgagaatctaatgctgctgatacgacgggaggtggagatcaggtggtaatgctcgcttggctgttgctcacctcctgctgcatggccctattcctaataggctaccaaccagtactggtccatggcctgggggtccatggcctgggggttggggacttcttctctaaggcatgccctttcctctgtaaggccagtgatgtggagggctgattccatttaatctgcagtggagctgagtctggactttgttgcagctttacctagattcagttgaacattgactttagtgcctttgagactttgaatcgaacactgacaagatttccagatatcttgctatgctttacagccatggtgctaggtttttgggcctctgggagatttctgcaagaaacaaagaaaggttgcaaagcatggccttagatgctagaatgcgacttgtgtggctctgattcggggttctttgtttccttgtcctaggtattcctggagtggagagccactctttttgacctgccctacatcagaagtcaccgagctcccagcctgcagccagtgtggaggccaaaggatatttgagtttcagcttatgccagcactggtcagcatgctcaagagtgctaatttaggtgagaagccctttattaatttgagtttgtggatttctggcattatttttaaataaatgaaaaaccttttgtttacttataaaatatcataagcaaattacagaaaatttgggaattaaaaaattattttaagaaatttaggccaggtgtggtggctcatgcctgtaatcccagcactttgggaggccaaggcgggtggatcacaaggtcaggagatcgaggccatcctggccaatgtggtgaaaccctgtctctactataatataaaaaattagctgggcgtggtggcacgtgcctgtagtcccagctccttgggaggttgaggcagggaatcgcttgaacccaggaggtagaggttgcagtgagccaagatcgcaccactctactccagcctggcgacagagtgaggagactctgtctcaaaaaaaaaaaaagaaatttataatccagccagtcttttttttttttttttaatatttattgattgatttatttattgagatggagtctctctctgtcgcccaggctggagtgcagtggcacgttcttggctcactgcaacctccagctcccggggtctagcaattcccctccctcagcctccctagtagctgggattacaggtgcccgccaccacgcccggctagtttttgtatttttagtagtgatagggtttcactgtgttggccaggatggaatttttgtattttttgtagagacaaggttgcgtcatgttgcccaggctggtctcgaactcctagactcaagcgatcctcccgccttggcctcccaaagtgattacaagcatgaaccatgcctggccagaaattaaaactattatcaatgttaataaccattattccaacaatcatttttgacataaagacaaatagcaagtcagatgaatgtatggatggctagacgaaaataattttcctaaaataggaaaattcactaatatggtaattaaaagtcttagaacaaatttttgtacaaattaacagaaggaatgttaagtataagtgaagcagttactggatttttttttttttccttcttttttcttgagacggagtcttgctctgtcgcccaggctggagtgcagtggcataatctcagctcactgcaagctccgcctcccgggttcatgccattctcctgcctcagcctcccaaggagctgggactacaggcgcccgcaaccaagcccagctaatttttttttgtatttttagtagagacggggtttcactgtgttagccaggatggtgttgatctcctgaccttgtgatccgcccacctcagcctcccaaagtgctgggattacaggcgtgagctgccacgcctggcctggacttttggtaataggttctttacctaagaggcccaagtttctgaaaggtgcttctgctattaacagaaaataacattctttctgtgtttcagttttagatagtatgcatctggctccttaccatagtagataaggaaatttataccctattcctaccttgaaatatttcagtatcttttttgttttttgagacggagtttcacccaggttggagtgcaatggtgctatctcggctcactgcaacctctgcctcccaggttcaagtgattctcctgcctcagcctcctgagtagctgggattacaggtgcccaccaccacacccagctaattttttatatttttggtagaaacaggtttcactgttgttggccaggctggtctcaaactcctgacctcaagctcccgacctgcctcggcatcccaaagtgcttggattataggcatgagccaccgtgcctggacccagtatctttttttttttttttttttttgagatggagcctcactctgtcgcccagcctggagtacagtggcactatctcggctcattgcaacctctgcctcccaggttcaagcgattctcctgcctcagcctcttgagtagctgggattacaggcgcccaccaccacgccctgctaatgttgtatttttaatagagacggggtttcgccatgttggctggtcttgaactcctgacctcaagtgatccgtccacctcgacctcccaaagtgctgggatttacaggcatgagccaccgcgcctggccagtatcataattatcacagctatttggatagccttagttctatgtgtaaatggattcagtgtttatcaccactcttagagtgagcttttttattcctgttttattttgattctttttgcagtagctggattttctcaagtaatagctttaaggagggctcagaggtatcttgcttcagattgtgcatggtaatgtggcttcatatttgaggggcaacccatgtataaaatttttaaatcccactttctcttttcagaaccttgtatagacccctgtgttgtcttctgacagtgaaagccctgccagccctttgccctggtgcctcctgtcatttcttggtggttcagtctcactgggaaatatatttttctggaagggcttatgggcattctagtctctgagatttttcactcatatagaaatgtcttttgcatggaatgtagctttgtagaggtatgagggtggtctgattttttccccctttgtgactaacatttttgccacaatactgttagcagcggtgaatctgtaggggtctgtagcaacctcagttcttgcctcctccgaagaaagaatttgaccgaggcacataagacagaggagagaccgaagcaaattttagagcaggagtgaaaacttactaaaaagttttagagcaagaacgaaaggaagtaaatatagttggaagagggccaagcaggcaacctgagagattcaagtgtccatttgacctttgacttggggttttatacttcctgggtcttgggttacttctcttgtttcttcccttggggtgggctgtccacatgcatagtggccctccagcacttgggagaggccgcatgcgcagtgtgtttactggagttgtagacttgctcacttgaggcgcttttcccttaccagtcagatgctcctagaggaatgtcatataccagttaaactctgccattttttcatttttttttttttttttgagacagagtctcactctgttgcccaggctggagtgcagtggcacaatctcttctcactgcaacctgtgcctcccaggttcaagcaattctcctgcctcagcctcccaagtagctgggattacaggtgcctaccaccacgcccagctaattttttgtattgttagtagagacggggtttcaccatgttggccaggctggtcttgaactcctgacctcaggtgatccatataccacagcctcccaatgtgctgggattacaagcatgagccaatgtgctgtgcccagccaatgcatacatttttaaacaatgtatttctcctttgctgctgcaaatcattgcctacgtcatcctcttgactcctgcttttctgttctaatatcaggagttcttattgcttatgttttcttggtatctttttttaatggctttattcattgataattttctgtaaactcttagggtttattttatattttttgcctgaatccttatcctttctcggcagtagtgtgtcctatgatatatatttctctcttctttttttttttttttttaagacagggtctcgctctatcacccgggccagagtacggtggtgcaatcatagcttattgcagcctttatctcctgggctcaagtgatccttctgccttagtctcctctgagtagctgggactacaggtgtgcaccgttacacccagtgaatttttttttttttagtaaagtctcactgtgttgcccaggctatatgagatatatatatattttgtttgtttgtttgtttgttttgttttttgtagagacaggtgtctcactatgttgcctaggctgggctcaagctgtccttccccgtcggcctcccaaagtgcagggatcacagttgtgagccaccgcacctagccaaaagctatgtatatcacatgaaccatgtagattaatatagattttcaacatcagatagctagacagttataatgaacacttgctgaaatttttgtttatttttaaagtatattttcctgccactttaaattaattttgcttttttgttatcaatattcacttattataggatagactgtgattctgttatagctgaaagcagtaagcactgtttttgctttacctaattactttttcagcttataaggtaaaatcattccttttagtaacatcagtctcataactctttttgctggaagcctgaatatgtggtatttttcaggtctttctgtggaatttggaacaattctagtttacacatgtgagaagagttgctggcccccaaatcatcagactcccatggaagaattttgtattatacaagaagacccagatgaattattgtttaagtagagcatttccttttattaatataaattaaaacaaatgtttacatccaaatatgtttgtatgtaccttattttaactcacaagttattaacctctgtttttctgagttgcctttttgcctttgggtgctggtgccggggccggggccgggccaggacctcctgactgtgggttggtctgcccttccagggtccagggccagctgtcacagtggcagctaggaaggtagctcctctctagtccagagggctggtgttgtctgcacagccgttctggtgggcattctaggggggaggagagcagcgaaagagccaagagcagtggtcagcctcttgtgtacacctctgacacgtgcactccagtgcttcctatgctgtttctggcacctgatcaagccactgaacctgctctagctgctggaggtttttgctctgtgaccctggctgtttagacctgcccatgttcatcagcccaggtccccgccctcacccactcccatcttctgctcctgcagtatcccaggaaggggtctttactccgttctggagactgtccctttatccagctgccttccagtcttcccctttctttatttttaacatgatcaaccccttcccttcagccccataacagcagtataaaaacactcccagccatgttcagacatgctctgcctacgtagatgaggataatgaggcctaggtgatcatggggtgggcttgtttcttgcatttaacattatatttggagcattttcccattaatatttttcccacaacataatttataattgctctattttttaaatatacatcaaaagctttatacaatttttagccacttgtattttccaatttttattcccatgatggccatccctgtaactaaatttatatatattttaaatcaatgataactgctacaggacagtttcctagaattggaatgaatgagtcaaaagttgtgcacaattttagggtttttttttcttttttttcgagacagggtcttgctctgtctctcaggctggagtgcagtggtaagggcatagctcactgcagcctcgacctctcaggcttaagtgatcctcctgcctcagcctcctgagtagctgggactacaggtgcaagccaccacgccctctagagaagctttgctttggaatctttacctggagtgtgttggagtgcttgtttcccaatcccttgataagtgttacttattttttctttctaccagtttagtaggtgaaaaacttttttttttttttgagacagagtctcgctgtattgctcaggctggagtgcagtggtgcaacctccgcctcctgggttcaagcaattctcctgcctcagcctcctgagtagctggggctacaggcttgtgccaccacccccagctgtttcggtgtttttttttgtttgtttgtttgtttgtttttttgagacggagtctgttgcccaggctggagtgcagtggcgcgatctcggctcactgcaacctctgcctcctgggttcaaacgattctcctgcctcagcctcccgagtagctgggattacaggcgcacgccaccacgcccggctaatttttgtatttttagtagagatgggggtttcaccatgttagtcaggctggtttcagaactcctgacctcgtgatccacccgcctcggcctcccaaagtgctgggattacaggcgtaagccaccgcgcccggcaggtgaaaatcttaccattttgcatggtttacatttttttcttttttgagacggagtcttgctctgttacccagcctggagtgaagtggtgcgatcttggttcactgcaacctccacctccagggttcaagcgattcttttatggtttacattttaatacgcttattgatcatattgtccaattttttgtgagtttcctgttcacatcctttgcctatatttttttgggggtgacacttgttaatttgtaagagctctttacgtatagggacatcagttttctaacctgtaaggaagtcttggctgggagttgaaaccccaggctagaaggcgacccttagactttttaggtctgatggcgggcctatgctggtgtgggaataacaccgccggtctcagctggaggtcgccagccctttgcaagagcctgccggtccccgcgggctgcagcacaccccggcgcgatgtgccctgcctgtgtctgccggaggctgtagtgcgcaggagcggaaaccaggccgcccttcccccacccgcttccggccgcggctcggttctcccgcctccgcctccgccgcggctcgtggttgtcccgccatggcactgtcgcgggggctgccccgggagctggctgaggcggtggccgggggccgggtgctggtggtgggggcgggcggcatcggctgcgagctcctcaagaatctcgtgctcaccggtttctcccacatcgacctggtgagggccgggcgcgcgcgcgtgaatggcgggctgtggtgcgggggctgggattcgggggttccggggctccaggggctctgaggctcagggcccggagcccgggaccggagttgcggagcgggggcaggctgagaggctcgggttgtgccccccccgcgggaggagactgttctttgggcacggggcgggcctccgctcgctgggccggctccggacgccgaggaggccgcgggcccccgcctccccggcagcgccaatgtgtggcgcttcgtgggcgtgaagccgcctcttatcctcccttcaaaacaaattcccggctgttaggagatgcgggagaggattgagtccctcgcggatgttgtgactttaattttgaggtccctgtcgtaactccgaagtaacgacgcggggcggaggatggcaatgatagcgaccaacgcgtcccgagcgctggtcacgagcgggtttacacacggaacgcgcaccatcttcataccacccgaggagtgcaaacgctatttccaccctgctttatttttaacagatgaggaaagggagacgcaatggggttgagtaacttaccctgggtcacggagcgagtggcagggctcccgcaggctgcgtgactgtcattgctctcacagtagacggtacactcgcttgtttcattaaagacgttaggactgtgccttttgcattggtgtacgttgacaagccagtgctattttgaatcgttatttctactaatgcaaactttttagagattggagatgttactggcccttcggtgtgagtttaaagtgtcttaagggctagtggaaacatggaatgaacaaaaaagtacgggtggccgactgagtcattgtttctttcctttatgtattatatatttaagcaaaaattagataaaacttaaaacatgatacttttttaaccatgtgtaaaagtttcctttcacagttctcaggttaatagtaaatgaaattgtgtatggatgaaggcttgaattaagggaggcagcaaaaattcaataaacgtttgccatgtatcatttaagaaaaagaacagaacctgggcaacatagagaaaccccgtctctacaaaaaaagaaaattagcggggcgtggtggtgtgcgcctgtggtcccagctacccgggaggctgtgtcaggaggatcgcttgagcctgggaggtcgaggctgcagtgagctgtgtttgcaccactgcactccagcctgggcaacagagggagaccctgtctcaaaaaacaaagaaaaagaacagggcatagttaaatttaatattttgtacttgaaagagtaattcgattgaaagagaaatactttagtattttttgagacagggtctggccctgtcaccctggctagagtgcagtggcccgatctcggctcactgcaacctccgcctcccaggctccagtgatcctccacctcagcctcccgagtagctgtgactacaggcatgtgccacctaattttattttttctatttcttgtagccaccagggtctcactattttgcttaggctggtcttgaaggtctgggctcaagcgattctctcactttgtcctcccaaagtgttgggattacaggtatgagccaccactcccggtgtagagaaatatgttaatatattttcagttagtgtttacctcgacagcacatatagttttaatgaattcacatatttttatggcatccagggagtttcctgaaatattttccaggatgattaaacaaacaaaatataccattctttcaaagtatttttgagaagtttatctctgacattaaatctagattcttacatgcattaaattattctttatcagtttaacaattttggtatggcgattcgaaaaacgctttctccactaatgtagcagatatcaaaagttctggattacaggtgctgagagtagtgatacagctcaaacatacgtaaacgtttgtcatttatctggggtttatgcatttgtagattgatctggatactattgatgtaagcaacctcaacagacagtttttgtttcaaaagaaacatgttggaagatcaaaggcacaggtaactatatttctcataccatttctataacttgatggagcttctatttgtgataccagattaatcctgcctgtcatataggagggaaaaaatgggtgaagctctcatttcagctgagagattgtgaaggataaagatatatcaagtaaaggactaaagattaagccctccttttttgttctaaaaaggaaataatcccgtgatggtgtaactttcatggcctctttatatttaagtttctgatgctttgcttaggatgcaccttgtgttcctacaccccctagaggttgactactgctatgtttgggggctagaggagcgttatgctgctgtcctagttgaaacaagacagttcccccgatctttgtttagtttttttagtgttccttggtgattcagagtcttaaaacatcttttccctttgcctgtctcccaacctgtttggcaaacccccacttgtttctctttttctttcatattttggcttcctcctccaggagtactttcctaaaccttttagactaagtcaggttggtttttctctcataacaacctttactttacttttcctatcattttcttttcttttttttttttttttttttttttagagatagggtctcactctgtcgccccaggctggagtggagtgatgcggtcatggcttactgcagcctagaactcctggcctcaagggatcctcctacactggcctcccaagtgctgggattacaggcatgagccaccatgcctggccttttcctgtcattctcatggcatttatcagagtctgtagttgaacttaatctggattgttatttgattaatgtctctcttgcttgacatgtacgttgtatagttcctggtacatgcaagatgctcagtaaatacttgttaagtgaatgaatgaatgacacttggttacttcatgttgtatttttgctgaagcttgccattcatgtagaagtgtgtttggtggtacgtgggtcagggggggctctccggttattttataagtataaaagtataattttataagtgtagcttaaccctaatgcaattttctcacatttttggacttctttggtgtttaatataaataaggtactatgtaagtagataacagcattgtggcttccagaagcagatttcagataggaacagaaatattgtagtaattcagtgttgtttatttttccaggttgccaaggaaagtgtactgcagttttacccgaaagctaatatcgttgcctaccatgacagcatcatgaagtatgctatagtgattacattgcaaagttgtataagggttttgtaagccaaatatataagctcaaagtcattcagcttttttaaaaaaaatgatttttctagaattattaaacagtggtggtttctgcttacagagtggcattctttttaccagttcataaatacatggtttgaatgatttagaatggtgagatagtttaatacttttaataaataagttacttggaaatttataaagaccttatatgcttgccttaagtaagaagatattttaaactatgaaatatccttatttatgatgattcagacttttctaaagtgtttgcctttttttgtttaaaagtttccctcccaaaataatctgtagtatgactctgacttctgtaatataacacttggaattgtggtagggcagtagtattgacagtacataaatatatttatctcagtaaagatagagtaaatatataattttggaggagttggagcaaaggaactgtgggccgaaattgtcctttatctatggtggtttagcttgcaagtaaatagtgttaaaaatagtccttgtttgaggtactggaattgaggtacttaacactttctcagggcatttgtatctccggattgtgttttttttgtgtgtgagatagggttttgcgcttattgcccaggctggagtacagtggcatgatcttggctcactgcaacctccgcctcctgggttcaagcgattctcctgtctcagcctcctgagtagttgggattacaggcgcacgccaccacactcagctaatttttgtattttagtaggcggggtttcatcatgttggccaggctggtctcaaactcccgacctcaggtgatccacccgccttggcctcccaaagtgcagggattacaggcgtgagccactgcacccggcctgtatctccggcttgttttttagttttttactctgtgaacctgcctgtagccctataacctccttaccctgtgttgctttcccagtgctgctaaaaacagagaccctaggggcctgaaccctgcctgatcctgatcatgtgaggtgaagtcagaggccaggcagatcctgggaatgtgttctttatgcgttcccaggcacttgctgcccaaagaaggcctagtgggactagtgaagtcatgccatctttctgccagtttgagatctttctcttgtgccctagctggccaaaaaggataggaatttgaaggaaataatttctttaaaatctgcttatgtttggaaagagtcaaaccttactatctatatgacatataatcctgatatcagttttgtttacagttactatgtttttttcagaactgtttattatactgcaaagatcatgtggaaggctagttattttggtgacctttttttattttgttttgtagccctgactataatgtggaatttttccgacagtttatactggttatgaatgctttagataacagaggtgaggttattttaatacttttaatttctcagtatttcctctctcccatatcaaatttgtttacaaatttaatatttattagactattgtgatttagaacttaaaagacttaagagaaatgatcgagtttaaagcatgcccattgattgcagttttatatagaaatgacttattccaggcgggaatttagctatcatattctctgcatttctaccaaaaggtataaatagaagtgaagtgaaaagctctcaaaaagtgtgactgtggctcagcacagtggctcacgcctgtaatcccagcactttgagagaccaaggcaggaggatcacttgaggtcaggagttcgagaccaacctagtcaacatggtgaaaccgtctctaccaaaaaacacaaaaattagccggtgtggtggcatgtgcctgtagtcccagcttctccggaggctgaggtgggagaatcgcttgaagccaggaggcagaggttgcagtgagcctagatcacaccactacactccagccttggtgacagagtgcgaccctgtctcaaaaaaagaaaaagtgtgactggagggtggggtgggggatgcttgagtgatattctttgtctgtaattacttccacatgtaaaagtatatctactaagtgagtttacaacaagttgggccagaaatatctaaataaaaaacacaaggaaaagtcaaaattacgtttattttttaaggcttggggggtctcactgttgcccagactagagtgcactggtgtgatcataactcactgaagccttcaaatgggctcaggtgatactcttacctcaacctctgcagtagctactctgcagacaggtaccaccatacccggctaatttttttatgtttatttttgtagggatgaagtcttgctttgttgcccaggctggcctcgaactcctggcttcaagcagtcctcccacctcagcctcccagaatgctgagattatgggcatgagccagtgctcctggcgtgaaattactctcttaacctgactcatcttttttccctagccttaaactactttaatagttccaagttgatattccacattctgccttcatttctatcatgtattatctgctagttatattagaatagtggtgagtttaggaacaccttgaaacagtgttttgtgtaaggtacagcaatagaagagaaatatggcacgttggatttttaagattatgtgtttctgtgggtacttctcctggagtaaatttgtgatataaattctatttgatattttgctaagtgaatgtctcttaaatgtctgtaattaacagttgtattattctggccatagctataagaaaattgtacaaaaaatgaagccagtaagatagttttgagtctgtgtcatcctaattaaagataactaattttttttttcccaaaaactcatactgtttgttttacttccagctgcccgaaaccatgttaatagaatgtgcctggcagctgatgttcctcttattgaaagtggaacagctgggtatcttggacaagtaactactatcaaaaaggtaaagaaaagttttatttttttaacttcccaaatatttatttgagaccttggagcaggaggaaataaactttgtatttatataaaatgaacaggtgaacatccaaaatgtaaggacttttatgcttatataaaacttaaaatgcggggccaggtgcagtggctcatacctgtaatcccagcacttcgggaggccgaggtgggcggatcacctgaggtcaggagtttgagaccagcctggcaagcatggtgaaaccccatctctactaaaaatacaaaaattagctggacatggtggccggcgcctgtaatcccagctacttgggaggctgagccaggcgaatcacttgaacctgagaggcagaggttgcagtaagctgagattgcaccactgccctccagcctgggctacagatcaagcctctgtctcaaaaaacaaacttaaaatgctataaacgtgctcaaaagactatgggcaaggaaatctttcagctctgccattttgtttcatttgacttttgtattaaaatccttagagtggtaagcatgatataccaggcatcaaaaatttctttgtgtcggctgcgtgcagtggctcatgcctgtaatcccagcactttgggaggctgaggtaggcagatgacttgaggtcaggagttcgagaccagcctctccaatgtagtgaaaccacgtctctacaaaaaatacaaaaattagctgggtgtggaggcgtgtacctgtaatcccagctagttgggagactgaagcatgagaattgcttgaacctcggaggtggaggttacagtgagccaagatggcaccacactccagcctgggcaacagagtgagactccatctcaaaaaaaaaaagccaggcgtgatggctcatgcctgtaatcccagcactttttgggaacccgaagcgagcggatcacctgaggtcaggattttgagaccagcctgtccaacatggtgaaaccctgtctctactaaaaatacaaaaatcagcgggcgtggtggtgtgcacctgtaatcccagctacttgggaggctgaggcaggagaatcccttgaaccggggaagcggaggttgcggtgagctgagatcacgccattgcactccagcctgggcaacgagcgaaactctgtctcaaaaaaaaaaaaaccaaaaaattctgttgtctaagagtctgggcttataatgtggaagggaactttgaaaactttttaggggtgtatttgtgaagtacttcaaacatttaaatacaactagagaataatagaacaaaatacctgtgtgctcatacctcagttttgttttggtttatttatttatttgtttatttttttgagacagaatttcgctcttgttgcccaggctgcagtgcagtggcgcgatctcagctcgccgcaacctccgtctccctggttcaagcgattctcctgcctcagtctcccgagtagctgggattacaggcgtgcgccaccacgcctggctaattttgtatttttagtagagacggggtttctctatgttggtcaggctggtcttcaactcctgacctcaggtgatccacctgcctcggcctcccaaagtgctgggattataggtgtgagccgccatgcctggcacatatctcagtttttaaaacctcaacacggcttcatttgctattcagatattttttctttcagttcttttaagaagttaaatattgtagttacatttgaagagtcgttttccatgttttgaaactatagaaagagaattataatgtacttaacatttgctggttgcgtctaattttttttggcagcttattcatgttagaaattgtgtctttgtttcttttaactgttaaatgttattcttggaaccttattgaataccattctacaaaagactgttgtgtatgtcagtgcgtattaagttgttgaataagtggaggccttcagtatctgttgacagatcaagacggaagttctctgtctgcattgcagtatgagtctcatgactgcttgccatgtggctaccctcaagaaagcatattggaaggctgagggcatcagaaatggtgtttcagagaaaactctaaatctgctgcaatttatattaaaacagtatttgagagttttgattcttgaacaattagcctggctaatttttgcatttttggtagagatgaggttttgccatgttagccaggctggtctcaaactcctgacctcaggtgatccgcctgccttggcctcccaaagtgctgggattacaggtatgagccaccacgcccggccagacattgctttttatatccttgttactgtgattctgacacaccactgtgtattaagactgaaggtggctgggcatggtggcttacgcctgtaatcccagcactttgggaggccaaggcgggcggatcacctgaggtaaggagttcgagaccagcctggccaacatggtgaaaccccatctctactaaaaatacaaaatttagctgggtgtggtggcacgcacctgtaatcccagctacttgggaggctgaggcaaaagaatcacttgaacccgggaggcagaggttgtggtgagcctagatcacgccattgcactccaacctgggcaacgagcgaaattccgtctcagacaaaaagaaaaaaagaagagactgaggttaggaatatctgagataatgaaagatgattcatttgatagttttgaaaagttgtctcaggtgtcatgtacttcttccaaggcataaattccttaaattgtaattttaaacttgaatgtgtatcaataaaatgggctgggcgcagtggctcacgcctgtaatcccagcacttttgggaagccaaggcgggcgaatcacatgaagtcaggagttcaagaccaagctggccaacatggaaaaaccccgtctctactaaaaatatgaaaattagctgggagtggtgggagatgcctgtaatcccagctctttgggagcctgaggcaggagaattgcttgaacctgggaggcggagattgcagccaagattatgccactgtactccagccagggtgacagagcaagactccgtctccccaccgccaaaaagaaacgtatatcaataaaatgaagagtatttggtttagtaacacctaagatttttctgtgtagggagatatatcttgaaattaatcttgtagtttacttaatttcaggagattataaggatatggctgtattccccagacccacttagttttgctcaaaaaaaaaaaaaaaacacatataagaaaatggctgcgaataatatttagataacatttacaactttgagaaataatttcttggaaagctgctgtttgtctttccagtagtttttctgtttagtgtgatcaaggtaaactcatatttgacactcaggtgtagtaatttttatttgggcttgtaagtcatgttcactgaaccaggagtcggcgtcctggcacagccttagctatgactggtagattcagttagcttttgtgttagtttatcataaagtaagcattttggagtcactaatattttaaaatttccttgacaacgtaaaacgtagttggaatatagatgaatgaagtgtttatattaccttataatgttgagaaactgccatcatggagtaaatttttctcatatcctgacttcatagggtgtgaccgagtgttatgagtgtcatcctaagccgacccagagaacctttcctggctgtacaattcgtaacacaccttcagaacctatacattgcatcgtttgggcaaagtacttgttcaagtaagagtgtatatttcttggcatgcttttcggtactgatgatggaaaatggagtcatttttatttaattaccttgaagagattgaactcaggatgtttaaatatggtgaagggatgctttagtagctttcttgcagtatttcttaggttaaatgtagctggccgggtgcggtggctcacacctgtaatcccggcactttgggaaactgaggtggtcggatcacctgagcgcaggagtttgagaccagcgtggccagcatggtgaaacacatctctactaaaaatacaaaaattagttggccgtgatggcgagtgcctgtaatcccagctactcgggaggctgaggcaagagaattgcttgaacccaggaggtggaggttggagtgagccgagatcgcgccactgcactccagcttggcaacagagtgagaatttgtctcaaaaaaaaaaaaaaaaaatgtggccatgactgttcaggaaacttagtcttatattggagacagccatgtaactaagcgataaaaatctttatatttggaaatgtgaacatttacttacaaataacccattggttataaaagaaatcacaatggaagttaaaaatactctgtactgataatgatgaaaatgctataccagaatgtattgaatgtggtggttggcaaaaagttacagatttacatacatgaagaaaggctgaacattaattactaaatctttactaagaatccaatttaagttagaaaatgaaccacagaatacactttaagaaatgagaatggtgtgggcatggtggctcatgcctctaatcccagcactgtgggagggtgagatgggaggatcccttgagcccaggagtttgagaccagcctgggaaacatggcaaaaccgtgtctctacaaaaaatagaaaaatgagccaggtgtacctgtactcccagctacttgggaggccgaggtaggaggatcagttgagcctgggaggttgaggctgcagtgaaccgagatagtgccactgcactccagcctgggtgatagtgagatcctgtcttaaaatgaagaaagaaagaaaaaaagaatgagaaggaaggatattaattgaagtaagagcacatttgattacaaaatagaagaggagtaagtgagaactaaacggggaatacagatagcagagattaaataggctataagaaaaaaaagggatgataataagaccatggtagtacataaaaaatttaaatgatctgggtaaatacatttttaaaaacttactaagtgcccagtgcggtggctcaggcctgcaatcccagcactttgggaggctgaggtgggtgggtcacttgaggccaggagtttgagaacagcctggccaacatggcgaaaccccgtctctactataaatacaaaaattaaccaggcgtggtggtgggcatctgtagtcccagctacttgggagactgagccatgagaatcacttgaacccagtgggtggagattgggccactgcactccagcctgggggacagcatgagatgatgtttcaaaaaaaaaaaaaaaatgaaaggaaaatagaatgcctgaatttagcagtataccttagagcaatgtaagtagtttaaattattctaaataatgcaccgaacctatgttatttttacagattcatttcacaaaacttgcaaggagtatattgtaatattagctaaactctccctgagaaatttttaaaagggaatactacttagcttgtgttattaggctagcaatgtctttgatagcaaaacctgtcaaggccattatggcataagaaacaattgctagtcagtctcacacctaaataatagatgcaaaaatcctatgtaaaatattagcatatcctgggaatgggcgcagtgtatcatgcctgtaatctcagcacttggaagctgaagcgggtggatcacctgaggtcaggagttcaagaccaacttggccaatatggcgaaatcctgtctctattaaaaatacaaaattagccggacatggtggtgggcgcctataatcccagctacttgggaggctgaggcaggagaattgcttgaacccgggaggtggaggctgcagtgagccgagatcgctctgctgcgctccagcctgggcaacagagcaagactccatctcaaaaaaaaaaaaaaaaaaattaccatatggatctagaatcatataaaataaaaagtgtgtcttgaccacgtgtctattcaggaatacaagcatggtttaaactagaaaatctgtaaatgtcattcactcattaggaaattaaagataaactatatagttttcatagatacagagaaagcatttggtaaaatttagcaaatggcctttcatgatgaaagtttctactaaaacagaataaaaacttactaggccgggcgaggtggctcacgcctgtaatcccagcactttgggaggctgaggcgagcggatcacgaggtcaggagatcgagaccatcctggctaacacggtgaaaccccatctctactacaaataaaaaaaattagccggatgtggtggtgggtgcctgtagtcccagctgctcaggaggctgaggcaggagaatggcgtgaacccgggaggcggaggttgcagtgagctgagattgcaccactgcactccagcctgggcgacagagcgatactccgtctcaaaaaaataaaaaataaataaatagataaaattaaaaataaaaaaacttcttactaaaatgagaatgttctcaacccgataaagggtattttgtagaaaccttcagcaaacattgtctttaatttttgcactcagaaaagtatacataacagtgtcaacttgataaatgttcacaaaaactacacttggaagctttatttatttggcaaacattttttttctttgggaggctgaggtgggtgaatcacttgaggccaggagtttgagaactgcctgggcaacatggcgaaaccctgtctctactaaaaatacaaaaattagtggggtgtggtggcacacgcctgtagtcccacctactcgggaggctgagccatgagagccgcttgaacctgggaggcggaggttgaagtgaatggagatcatgctactgcactccaacctgggggacagagcgagactgtgtctcagaaaaagacaaaaaaaaaaaaaagataatgtggccaggtgcagtgacacacacctgtaatcccggctctttaggaggccaaggcaggaggattgcttgagcccagcagtttgagagcagtgtgggcaacatagtgaaaccccatcactacaaaaaatttaaaaattagcaaggcatggtggcacatgcctgtggtcccagctacttgggaggctgaggtgagaggatcacttgagcctaggaggtcgaggctgcagtgagctgtgatcacaccactgcacactagccttggggacagtaagaccctgtcacacacacaaaaaagataatctggcaaaattaatatgagcagcatttttcactcgaagggaaacctaaataagcaataagcaagttatgttttaatcataagacttacttggaaaattaagtataagaccatagtaagctacagatgcttctcagatacttcccgataaactcatcataaataaaaaataccattaagtaaaaaatgatgctttttttgttgttgtttttttgagatggagtttcgctcttgttgcccaggctggagtgcagtgcaactgcaatctctgcctcctgggttcaagcgattctcctgctcagcctctcgagtggctgggattacaggcgtctgccaccacgcccagctaatatttgtattttagtagatacagggtttcaccttgttggccaggctggtctcaaactcctgacttcggttgatccacccgcctcggcctcccaaagtgttgggattacacatgtgagccaccacgcccagccaaaaatgcattttaatataacctcaataaacctgttgtaaaggtgaaaaatcattggtggaccattttaaattagcggctgtctactattttgcactcactagttggcaaagcgttaattttaggaagtgttaacatgccattgttgggagtgactatcagagctttgaaattatagttgggtggggggttgtacaaaggatttctgtaagataactttcattaatcatatacttgaggaaatactggaaacttttatatccatgagttattaaacagtttttaggataactttattaataaaagagaatctcagcttaatactttcaaattgtttgttaacactctgttcagcagtaaagagccattctaccatgaaaaaaagttaatcttgttcattgctgaatttctatcccctagatggggactctgcacctgaggtatataataatgtttgttgaacaggtagctgcaggtgtaaacacaaacattattctggtgttagaatgttatccaggttgtaagtgaaaaccactcacctgtttcttgagcagaggttttaacattgaaatgtgcagagcctcgctgataggaatggatgtaggtctgctaaaatttaaccttgcttacattgctgttgaaattgggatgcaagctgtccaagcacattgtgttaaacttttaagtttatagtcatttatccgttattcacttttttttttttttttttgagacggagtcttgctctgttgcccaggccggagtgcagttgtgcagtctcggctcactgcaacctccatctcctgggttcaagcgattctcctgcctcagcttcccgagtagctgggattacaggcgtgcgctaccacgcctggctaatttttatatttttggtagagacgaggtttcaccatgttggtcaggctggtctcgaactcctgactttgtgatctgcctgcctcagcctcccaaaatgttgggattaaaggtgtgagccactgcgcccagccagttgttcagtctttatctctgctaaatatttggaatattctaaattacatgtttgtttagaatgctttgttatacagaagtatttactattcttaaattatagccagttgtttggggaagaagatgctgatcaagaagtatctcctgacagagctgaccctgaagctgcctgtgagtaaattatttggcatatgttttatcagatactattatctttattttgttgatttaattttggtagcttaagggaaaaaaattgctatatgtgctaggtaatgtgtgtttaacatgtgttttttttttgttttttttttttttttttttttttgtctcagaggtggagtttctctcttattgcccaggctggagtacaatggtataatctcggctcactgcaacctccgccttctgggttcaaatgattctcctgcctcaggctcctgagtagctgggattacaggcacctgccaccgcgcccagctaatttttgtatatttagtagagacagggtttcaccatgttagccaggctggtctcgaactcttgacctgaggtgatccacccgccttggcctcccaaagtgctgggacaggcgtaagcaaccgtgcctatccaaaacaatgttttacaaaaaaaatatgattccgttttactgatgaggaaatcaaggttaagagaaatttcacaagtctagtaaatagagctgcgagttgttcctagatctcatgactggtctgtgctttgaactgttatatgtgtagctttcagaaactaagttacaacaggccaggcaaggtggctcacgcccgtagtcccagcattttgggaggctgaagcagctggattgcatgaggtcaggagtttgagaccagcctggccaacatggcaaaaccctgtctctacaaaaaatataaaaattagccaggcatggtggtgcatacctgtagtcccaactacttgtgaggttgagacgggaagatggcttgagcccaagaggtagaagctacagtgagccgagatcttaacactgcactccagcctgggcaacagagtgagactttgtctccaaaaacaagaaagaaagaaactgggatacaaaaagatgctgatgaatgtgttattttcttattccttgaactcagaatgtgttgcatttggggatttccatgagtgactttctttttattcccaaaggtgagtgaaaagagttcagttctacatttattacggttgaaaataaaataatgatcgttttataggggaaccaacggaagccgaagccagagctagagcatctaatgaagatggtgacattaaacgtatttctactaaggaatgggctaaatcaactggatatgatccagttaaactttttaccaaggttagatttactttttttataatcatggatagatgtattgttgtgcatagatgtattgttctagttctgcttgttttaaaatagtccataaaattgaattaagcttctatgtatatgccttgtgatgtcctaataaaatgattgatgcagtcaggatatgcaagttttaaaatgttaccatctacactaaatctatcagtataacatctaaataggaggtaaaatgagaggtggcttgtataccttcttggttgtctttccttctctcactttttacagaacttcttcgttttcctgctgcttctcatcttcactttttttttttttttttttttgagatggagtctcactcttgtcgcccaggctggagtgcagtggcacgatctcggctcactgcagccccgcctcctgggttcaagtgattctcctgcctcagccttccgagtagctgggattacaggtgtgtaccatcaggcctggctaattttgtatttttagtagaagcggggtctcaccatgttggccaggtaggtcatgaactcctgactgcaagtgatctgcccaccttggcttcccaaagtgatgggattataggcgtgagccactgctcctggcttcatgttcacttttatttcttgctcatatctgctattagcagtttgactgacatgtgtcctaaattgcccttgaaccccataagcccctttttcttggtgaaatccctcttcatcagtagtatatactatttgcctgttaaatatttctagagaaatctgtgaaattgtttttattgggtctacctaattattgttcatctagacccgtaggtccgtgttttaaaagtttttttgttctgtcttgactccctagcaagttgtacgtgtgtggggtttttttgactctttttttcctttttgtggagaatggggtctcaccatgttgcccaggcagatctcaaactcctggtttcaagtctcaaactcctgggttcaagcgatcctccagcctctgcctccctaagtgctgggattacaggcatgaaccactgagcctagcccctagcaagtttatcacagagcttaaaactttctcagctcttatcaaactgcctcagtattcttgcaactctcactaagcagatgaccttaaggatataataacaggtttgaaaccattggacataatttacctgttgagagactgttccacataaccgaaaactctttttctttctgctggagagaatccactttcggtaaaggctaacttttgcatgtggtgttttgctttccttttgtaccattcttcagacaggattttcgtctctgtcctgtgtctcggatcttttttttcttggtttcttttgtctgctttccaacacgcacaggttctgctgtcttaatcaaatgacatactgctctccccagcttgtatttcgtcttatttcctcagtggtaacagatgtcacatgttgacttttttttttctttctttttttttttttttgagagagaatcctgctctgtcgcccaggctagagtgcagtggcatgatctcagcttgctgcaacctctgcctcctggttcaggctattctcctgcctcagcctcctgagtagctgggattacaggtccgccactatgcctggctaatttttgtatttttagtagatagggggtttcaccatattggccaggctggtctcgaactcctacctcaggtgatctgcctgcctcggcctcccaaagtgctgggattacaggcatgagccgtcgtgcccagcccacaggttgactttcttatccctattgcatttatttcctcactacagcccttttctaaaacatggttgtattagggttctctagagggacagagctaataggatagatatatacaaaggggagttgatagagtattaattcacacgatcacaaggcccaacaataggcccatctgcaagctgaggagcaaggagagccagtctgagtctcaaaactggagaatttggagtctgatgtttgagggcaggaagcatccaacatgggagaaagatgtaggctgggaggctaggccagtctagtcttttcatgtttttctggctgctgtatattctggcctcaatggcagctgattagatggtgcccacccagattaagagagggtttgcttttcccagtccactgactcaaatattaatgtcttttggcaacaccctcacacacacacccaagaccagtactttgcatctttcaatccaatcaagttgacactcagtattaagcatcataatggtttttattttgattatacttaagatgccgtaaacttcgatatggtcaacagcagtatcttccaaaccagtatccttatttccattccaatctgagcaagacttgaaagccagaaaaatctgaagtgcatctccaatctgttatttagcagataattttaaacatctgctgtgtgccagacacctctttaagtacaggggatttagttgtgaacaagacagaagacagagtccttgctctttagagggagttcacagtctagatgagaagtcaaactttgaacaataaatttcagcttcagagtcttaatgacattaagttcagatgctttgcagcccttgaataataagtttcatctaaaggactcatctcctggcctgcatacccatttcagatgttgttagggagaggcttcagaagaggctttctagagcaggtgacatttaagcccaaggcttgaaagaataagagtcagaatagggtacagtatgtacaaggaaactctgaatagggtacagtatgtacaaggaaactctcagttggaaaactgacataaatcccattaagggggagagtggaaaaagatgactggagagagaagttgaggtcagatcaggcagactttctaggccttcttaaggatgttatagcaagacagtgggaatccattgaaaggtggtcttacaggatcactataaggggatagaggggatgcacatactaccctaggatctgatattcatattataaccaatctgggacagtgcccctggagttgtgcagtgccagaataatctggagtacagccatctgtactcccactggaacatggaggagtagactaaacaggactttgcatgtatatggtgaagatcagtggaataaaaaatggtacctggctgggcactgtggcttacacttgtaatcctagcactttggaaggctgaggcgggaggatcacttgaggccaggagcacaagaccagcctgggcaatatagcaagaccccatctctaaaaacgaaaaaaaaatagccagccatggtggcctgagcctgcggtccccagctactcaggaggctgggacaggaatatcacttgagcccaagaggttgagacttcagtgagctatggtcacaccactgcacttcagcctgggcaggtcaaagaacagaggtgctgttctccgatataagtgagctgggaggcagatgtgtgtagaggggttgggggagggtaggagaaggtgataataatcaattttgaactcatttgagattcttttggaacattagagaagtggttttgtagataagtagagaggtttcaactagggatatggttgggattcctaggtttatagatgtggttaactactggaaatggacatgatacaccacagaggacagaatgaaaagatggttcagtacagaaatctgaggggctcctgatatttagtaatagttgaatagaagagatggagcttaggcttagaaaactgttggttcaagccttcaagatcctctacaaaatgtttccagccacatttgttacccaagtcatagtggattcatctccttgcctttgtacccatttcacatgttgctgtcataaggagactctttccttatttcttagataaaatataaatctttttttttttttttttttttttgagactgagtctcactctgttgccaggctggagtgcagtggtgcgatctcagctgactgcactctccgcctcccaggttcaagcgattctcctgcctcagcctcccgagtagctgggattacaggcacgcgccacgacgcccagctgatttttgtatttttagtagagatggggtttcaccatgttggccaggatggtctcgatctcttgacttcgtgatccacctaccttggtctcccaaagtgctggattacaggtgtgagccaccacgcctggccagaaatccttactcaaggctttgtgatattcacactaaattgtattctgattatttgtatgtttggcttattctctataaagattaaggatgctcagttagtattgatggattaagtatattttgatagaaatggctgtgatttttaaatatagccaaatttctgttcttacctggtaccagcaataaatgtgttgaataaattaatcaacaatagaaaatgcagataaggaaaaagaaaaaaatattaaaatcacttgaagttctaacacatcttttcatatgatagtttctcaatctacttgtaatgtttttgtttttgtaataattgtgtgggggtttttacattttatttttgttcatgtttctgtgggttatttttggaggggagggcacattttaaagatatcgcagttcagaagttctgttgtgaagcactttagtttaaaaatctgtatactttgtgtgcatgtccccatgagcttggaggcattgctgactggcatccctaggctcagtgattgtctgtagttgtacatttatttacaactacataatgtacatttatttgtatgattgtgcttcagactgatctttggagctaaatttagggaagcttttggagaggtgacttaggaaggcaggggcagtcggcagttcagggctcctttactctgcattcctcagagcacttctgcatttcgctgttttcaatgtagagattctgttagaacttccttttacaaatgtttttccttttgaaaattgttatgctgctggtatatgacatgtatctttaaatcagatttcatagtgtaatatagatcagcaatgacgttttcttgtatcttatcaattagggattatggggttcatgggatctgtctttcttttgtaagctttttaaagatgacatcaggtatctgttgacaatggacaaactatggcggaaaaggaaacctccagttccgttggactgggctgaagtacaaagtcaaggtaaagaatacattttagtcttggaacacctaagctggaaatatcctcgcgtaaagtctttgtatagccctgttgttgcttgaaaatgatatgtcttcatatattcaaacagtgcaaaaaaatatgaagaacaaaagtcactgaagtcccacacttcagaaatagccactaataacattttcaggagtgttctggtggtccgccctatgtacacagatgcaggcattcgttatacactgcgtaaatggaatcatactattgataaactctcacttgcttttgtcagtcagtatagttaactagtctcttattaacatgtagtgtttttgtattttccctgaaataaagttttgaaattgctatatatttatgtatatcttttttttttttttttttttttttgagaccgtgtctcgctctgttgccaaggctggagcgcagtggcacgatctcagctcaccgcaacctgggttcaagcgattctcccgcctcagcctcccgagtagctgggataacaggtgtgagccactgcgcctagcctatttatgtacacctttgtacccttgtgattatctctttaagatttaatctagaaacacatttttaatgtaaaatttttttaatgtttagaaatgaaaagttttttgaggcatagtcttgctatgttgcccagattagagtgcagtggctgttcacaggctgtcatagcacaaggcatccctggactcctgggctcaagccatcctcctccctcagtctcctgagtagctgggactgtatgcaactgtgcccagcatattttaaaattttaaatgtaggaaaactattgtagtggctgctttctcatcccactcccctttaacactccttgtctctcctttatctgaactgtattaggattaatttatgcacagcagtatagcacccattgaaacttaaaagatcccgggagacttgggatatcattttggagcagttctcaacaatcagggatagttatcaaacagatttaattatgactctagtagtgtccgcttactgagttctcattctcactaggtgctgggcctaatgcttatttatcatcttatctacattatatcttcaaatctcccagtaatcctatgaggtactgaggtggtcttgtacctttcctatctcaggtttaacagtttttttttttttttttttttttttttttgagacagagtcttgctctgtcgcccaggctggagtgcagtggcgcgatcttggctcactgcaagctccgcctcccgggttcgcgccattctcctgcctcagcctcctgagtagctgggactacaggcgcccgccaccatgcctgcatattttttgtatttttagtagagacggggtttcaccatgttagccaggatggtctcgatctcctgacctcatgatccgtctgcctcggcctcccaaagtgctgggattacaggcgtgagccaccgtgcctggccccatgataattattttaatggaatttatttcatatttgatttcttaatggtcggggattgaacttgttaaacagagcacagtagaggaatgatgttaattagtgaaatttctaatatatatatttttttctttaggagaagaaacgaatgcatcagatcaacagaatgaaccccagttaggcctgaaagaccagcaggttctagatgtaaagagctatgcacgtcttttttcaaagagcatcgagactttgagagttcatttagcagaaaagggggatggagctgagctcatatgggataaggttcgttttgacaatgtgtggcaagtacttacatgtcaaaagtgtgttttagttcttgagatgtaatagaagctagtcattttttgaatatttactagattttgaggaaatatattgatttggcttggatattttcagctctaattgctgtatggagctgaattttctgtacatgaattcaagcaatatcataaaacttcatttgggattctagtgatgtgttcagggtttataattatgttgactagaaaaataacgtgaatatattaaagtgaaatgtttcttgtgtagagtagatgtattcatagaagtcataaaatcatttggagaaaacatctcattggcctgatttgcccttgaaaatagtaagattgtctttgaattgaaatagttattactatttcagaggtctgaaagacagagctcttgatacaaaaatgagatgtaattattcttagaagttaaaatcatatttaatagtactctgcagttatgtcatcttttgagatttgatattatgaactaattttacttaattttaattgtaatcagtattttctatggctaaaagtgttttatctcatgaagcttgtatgttcctgtggtgttgaagattagtcatgggtcttaaggcataaaggccaattttagaaacctaagaaaaatttgtgtgtacatattttgaaactttggttgaatcagacatctaaatacactaaaatgaagctagtatatttagattcttgggattcttataaacattagtctcttgggttttgtgatatttaaagggtaacttttcatattttcattgttattgttatgctagtgatttgggaagtttgattagtgcacagaggctaaataaagagcccttggaatgggaattgttatcctcttgagtaaagtccacatgtaatgggtgtgataagacagctgcttagggaagacactgtgttgagtattcagtattcttagtcctcaccacaccttatgagatggggatataatttcccctatttaatagattaagagattttgactcaaggaatttgacttgcctgaggattcacagccagccaataaatacataaagaactatgctctcagtattttttcttctgttctgtgatgcctctgaattttagaccagggtgatatcttctcagttcaaagcaggaagccttgctgaaatctagagactaggatatagtctcaggaaaaatacaaatcgtaacaggaaaaacttggattgtattgccttatttgaagaaacagcatatgtgagagagtggtgcatatgaagagagtttggcaaaggggagtgaaaaagagtcatccaggtttttctgaagtgttaatgaaacagcttttttttttttttttttttaattgagacagggtctcactctgtcaccaaggctggagtgcagtggcatgatcttggcttactgcagcctctgcgtcccgggttcaagtgatcccgccacctcaggctcccgagtacctgggacgactttaggtgtgcgccaccatgcctggctaattttttgtgtttttggtggagatggggttttgccacgttgcccgggctggtcacaaactcctgagctcaggcaatctgcttgcctcaacctactaaattgcttgagactacaggcatgagccaccatgcccagcctaaaacagttttcttaaattgctcgtcttttggcctggattctgtgtttgtccagcaaccttctctttactgatgaatggaaccaggaaagggttgccattgtcagtgagtggaattgagattccggtgtatacaactgagtctccggtgcctttgtttaggctggagtgagttcctagaagctggtgattcttggtgttcttgtcagactcattactggaccagaggagctgatgatgagaccccaccccctacttaacccacctccatgctactgtgaggtcctagctgactggtctttccctcagcaacctcttgttctagtcgaaagtctatagtattataaacacgtgaaagtattgttctgaaagtaatgcttcaaaatagtcaatttgtggagaaacttgttaaattgtttaaattattggcaggatgacccatctgcaatggattttgtcacctctgctgcaaacctcaggatgcatattttcagtatgaatatgaagagtagatttgatatcaaatgtaagttatttgtactaaagttgtatcactaaaaccttgaagttgttttttaaacagtgaaacatactcatccttttttttttttcccagcaatggcagggaacattattcctgctattgctactactaatgcagtaattgctgggttgatagtattggaaggattgaagattttatcaggaaaaatagaccagtgcagaacagtgagtatttctgtttgcatttttatgcaaccccccttaaaaaaatcattaattaaaagtacattaaacagataatttttaaaatgaaaacaataaaattggtttaaagcaatggaaaagtaatttttctggttaccaagtgagtgtgtgtttaagcttcctggaaattgcaacaaaaaggaaaaattaagaagttgcttttgcttttaacatttccaattttactgaattcttcgaagaattcattgtgcggtccttatactaagaagatgtttcaactgtttttcaattctgagagtgctatatgggttttaaaatttgcttggtcattttatagtcccctgttcagtcattctcctattgagtcattcttttcaattttattgtatagtttttgataatgttaatgtctgagatctttatgggtgagtctgctgtcatttctgctatttctcgtagtgatttgcttgtatggtttatgattttttaaaaactgaatgtgtattagaattgtgtctggtaattctttagggacccattgtagatgtatttcttcaaagagcatttgtggttattatatttgggtgcttggggcactgccaatacaggaccacttttaaattaggattttcaatacctatgtattcagaccacaaacctgcacgtgccctatgttattgtcatgaattatatgggaagatactcctccccctccactaagcaccaagtttaagatcatttttatggagaaagtatttttctcctctcttttcaggtccttgctttgtgtaagggtctcctgttttaagagttcctaccttagtggtgggtggggtaggtgtatctcttaaggctaacactacttggatgttctctttggattccttccttcgatgttgtgtctgcagacacttcgctttcttaccagctcaagaaggcttcctaggaaatactagccaatactttgactgttgtttaggttctcctttttatcattgaaataaaaagacctgtttaccttcagaaatttcaaaaaatatctagtttgcaatggtactgttattttgcagtgtcattgatgcacacttacttttttttatcttttgagacggagtctagctctgttgcccaggctggagtgcagtggcacaatcttggctcactgcaacctccacctcccaggatcaagcgattctcctgtctcagcctcctcagtagctaggattacaggtgcatgccaccatgccggctaatttttgtatttttagtagagacgggtttcactatgttggttaggctggtctcgaactcctgacctcatgatccgcccacctcggcctcccaaagtgctgggattacaggcatacaggcatgagccactgcgcccggccttttttttttaaactgatggggtcttgctatgttgtccgggttggtcctgaactcctgggctcaagcagtcctcccaccttggccccccaaagtgctgggattacaggtgtgagccactgcacttggcccgatgcgctctttttttccttttctttttcttttttttttttttttttgaggtggaatcttgctctcacccaggctggagtacagtggagtacagtgatgtgatctcggctcactgcaacctccacctgctgggttctagcgattctcctgcctcagcctctcaagtagctgggattactggcacatgccaccacacctggctaatttttgtattattagtagagacggtgtttcacctgttgcccagattggtctcaaactcctggcctgaagtgatccgcccttctcagcctcccagagtactgggatttcaggcgtgagctattgcgcccagcctcgatgcactcttaaaatattttattttcatgaaatttcagtttgaaggaacagaatcaaattgcccagtctgccatcttgatttagttttctatttaaacttttattgtatatgttatatttttaatttctaagaactttattttttggtatcttttttttgagatggagtcttgctctgtcacccaggctagagtgcagtggcgcgatctcagctcactgcaacctccacctcccaagtagaagtgattctcctgcctcagcctccccagtagctgggattacaggcgggtgccaccacgcctggctaatttttgtagttttaggagagacagggttttaccatgttagccaggctggtcatgaactcctgacctcaggtgatctgcccaccttggcctcccaaagtgctagaattacaggagtgagccaccgttcctggccgatacccagtttttaaattatttaaaaaaaattttttatagcagcctgaagctgtagtatccctttgagctcaccaacagtactaattactgaacttattaaaatgtctgttatttcccatcacatccttccggtttctttgcctgcttagctccatgccactcttggactattaatagtaatatatctggccgggcacgatggctcacacgtgtaatcccagctctttgggaggccgaggcaggcagatcacctgagattggaagttcgagactagcctgactaacgtggagaaacctggtctctactaaaaaaaaaaaaaatatatatatatatatatatatatatatatatataaaattagctgggcatggtggtgcatgtttgtaatcccagctactcaggaggctgaggcaggagaatcacttgaacctgggaggcggaagttgcattaagccgagatcgcgccattgcactccagcctggcaacaagagcgaaactctgcctcaagaaaaaatatagtaatatatctggatttcatttttttacatttgcaaatgaattccagcctggattaatgttagcccaggtattaatagtggtagcaattgcttttattattgtcagtttcccttagcacacttaccttcccggtgaagcccaaaatcaaacaaatctttctccctctgtagcctgcttggcctgggcagtttgcttctagcccttccacctaccagtattcattgtacggagaagctattttacagaggacggctttagtgtctcttgagggatttagttctgtattctcaggggaatccgtagagtactcctttagaattcattcctcttagcagactcaacactacattgtagtcacaagataaaggtttgtgtctcagcttcttgtcttctgacatttgttgtttctgttggatcttgctagtgttttctaaactttagtagaagcaggagcttggagcttttcttaatttcagtgtaatttgtatatttgccttggttcttaattatttttttgtttagtattagagaaatggtaaataggtacatatactgccagaaatacatttttttccctcattatataaatgttattctaatcagaaaatttgggaaggcagtgatgttgattctagacaactgtgaaaggcactatcgttaactggagaaattaatgtgttggtcttgtcaggagattgcttgcttgataagaatagcctcagggagggacaccagctgctgatacaatgatggcaccacagattaacatgcctgtgcccttactcttgccaaatcaggttgcagaagaacgcggagtcttatataatacaaggagatgtcttttcagcaagcctagctagcctagcctttagctgattagaaaagaaggttgaggccgggcgcggtggctcacgcctgtaatcccagcactttgggaggccgaggcgggcggatcacgaggtcaggagatcgagaccatcctggctaacacggtgaaaccccgtctctactaaaaaaaaaatacaaaaaattagccgggcgaggtggcgggcgcctgtagtcccagctactcgggaggctgaggcaggagaatggcgtgaaccccagggggcggagcctgcagtgagccgagattgcgccactgcactccagcctgggcgacagcaagactccgtctcaaaaaaaaaaaaaaaaaaaaaaaaaaaaaaaaaagaaggttgaaaaaccaggttcctaaaaaggtcatgattttcctgatccattttgccatctggacgggaatttttaagtcattttttattggatatctggtaaacgagattttagattgtatggcgtataaaattacagcacgtttccgatttctgcctgttatttctcctccaaagatttttttgaataaacaaccaaacccaagaaagaagcttcttgtgccttgtgcactggatcctcccaaccccaattgttatgtatgtgccagcaagccagaggtgactgtgcggctgaatgtccataaagtgactgttctcaccttacaagacaaggtcagtgcaaggcctgggtctcttttccttttgcttttacagtattactgtgatgacaaacaaacactagctgctgattctgaaaaggtccaactgcagagatgtgtggctgtgatttcctgggttattttgccttctggattcctgcaggcttttctgtctgtggttccagaataagtgcctcacattcccagaatggagtaggagtatttgactggaatctgcagcacagtggtggcacagtatcacagcaagcagaggacttctttgctctttgcttcccaggcagtgggtaaattctgtattttttgacaaataacaggtatccttgaatggtcctcactgtggcagtgagcagataagtatttgcatgcagtgcaaagtttgcatttccagtagagcaaagccccagttaccagctttgtattaaagggtataagtaacttgcagagttttggtttctctgcgtgttggacagtgcccactcccagcaaattagggggcttttgttatttctgaggtctgagttgaggctaagtggtggtacacacttatctaatatgacctgattctgatatggtaagttagtccctgaggacatagggcatttgcacacctggattcacctctggagctgaagcgagggaagaaatgggggtttaggacatggtctggtccttaagttcctgttaaattggctagatttgtgtattaggggagattttctttttttatgacccaaaagtgtcactttccactttgggatcacttcctattgttctctggttgtgaccatcataatgctacatatttacatgcctcttgagagaggaggaagtggcccttctcaaatagcagtgctgcctgatagggaatggcctttcttccagaaactggttaggcaggacggattgatttgagcttatgttttggtcaaggaagtggcaggtacagcagcgggtggttgccccagtttcttttctaggaaataattatctttggtatctcctgattcttgagcttcaaggttattcctctatttgtaggattcttagacctatagagagttcctccttttttccttctttcttttttaggagctggtaggatttaacagaatattatcacttctctaaatgcatggaacggggagacttatctgagagtcaggttaatgagaactgattccatctatgaaacccctgccattacagggttggcacagagactgaaatgaaatatgtcaagtgtgtagctcactacctaacctgcagggaaagacaaagtagcaagagccagccagggagttcctagtcccctgttgagatgaagttggatctgatctgcatcagtggtcagatgtggggatggaactcaggtgaatccccacggctttcctgcttgctctaagggatcttgaagagtgacttcgccggtttccaataaatagaaggggaaagtaagagcctttatagaagtctaggatttcttatgatctttaattacctacgttaatattttgaatccttttttttttttttgtagatagtgaaagaaaaatttgctatggtagcaccagatgtccaaattgaagatgggaaaggaacaatcctaatatcttccgaagagggagagacggaaggtatcatacattgtatttattcattcctctcattgaggagactgcttgaagagtgcacattagttgattcatttactgtatgtgatactcagtattgcagagagtggcagtgtttggtcatgaaggtgctctttcaaggtgacattgctgggggtcatcacacttccatgtttgggaactccatgtcagacattttcagggactgcagtgctcttgtccacttccaaggaacctccttgccgatatcatggatcctgggagctaaccttgtgatgagaagactattctgtctgtcagatcacagtgggtagggttctaaggcatttggagatttttctccaagagtggggaagccttggtagcctgttcctactatatagcagaaagattattgaaattcagtgcccggttttggctttctgatctttcctttcaaaagttcaagcagttcatcccttttgctaacacatttgctatacaaggtacaatacatttgattctgttgaagctttcatagtaaggattgcatcgtagttattcctccttcagactgtactcgttgatcctatacctccttggtcacttttgcagctcatttcttgagttgctgttctcgttttttccatgtcccagtttttgccagtgtactgttattttcgaaggtttctaggccctgtgtttccctgtatattgacttaattcatacctatttgtccattggtcatttattcatactttgtgaggtcctgatggcgattcagatgttaagccttctttaaattcaggtttagtgtcaaggttcttcttggttgtagttgcttgttgagaaattttttgggctattaggtcatgtgtaattggaggccatgttttggctgtgtggtgctctattttaggagtctacttgagtattcaagcctcattctagccagctgacttttaaaaaaatgtttgtttgtgattatatgctgtcccttagttgtagccagctctttcaaatgctagcttaaaaatggaaactggtcaggaatttcagtggcttcagcgtgacccttctgtacggaatacatgtggtatggagggtgagacagcacttaccagaatatgtgtggagtcctgtatgacaggcatagttttgggtattcataagtcaaggatgaataagacaacagaccttggcttgaagtgccttgcagcctggaagaagggagattgtcaacagctggattgagcatcgtccaaggaaaactagaaagagtgtgtacacagtatgaatctaaggaaagtatattcagctttgtgaaacggagggggagtaataggagagggagtactcttgggtcagtttttgaagtagtagtgaggactccctggacaaagaagagagcatttagacagaatgaacatctgtctacaaaggtgtgaacttgtgaaacaacctaaactgccttgggagtggcccattatttggtttcgctggaagttggggtgctgaggggttggcagcagtggtgaggttgaagtctttcttgtcacatgtgcagtgtgtgtcttcctcctctcccttgacccctaccctccagaggaaggggcagtatttcactgccacctgccaccagggtttaaacaggggagtagcagggagctattagggaggaggggattgagggatttttactaaggcagaggcaggtgatagatttgagatttgcaaagtcagaacttggagcccagttgaggaatagcattacaatgttagcagcgttgttaggcgagcacaagacttcacaggtgatgctagttcaccaaaatgtgaacccacattaactggttttccttttgaatgtgatggttccaagaggtttgcagtcagtggagatgtgtgaaagggcttggaggtggaaatctgggtaagaatgccaagggcattcctggtagattaaaatggtaaagcaagcaacagatctggaaaagaactaggagaaactgttagtattttctgggtgtcaacgtagggaaaggcgttctaagcgttttccttataaataatgaaaaaatgttaaaaagccaaaaaaaaagtggggggagactgaaaattgagattatatagaaaattgggcttggtgcactggctcacacctctaatcctagcactttgaggggccgaggcgggcagatcacttgaggccaggagtttgagaccagcctggccaacatggcaaaacctcatctcttgtaaaaatacaaaaattaggccgggcgttgtagctgtaatgccagcactttgggaggccgaggtgggtggatcacctgaggtcaggagttggagaccagcttggccaatatggcaaaaccctgtctctactaaaaatacaaaaattagccaggcatggtggagggggtgcatttaatcccagctattcgggaggctaaggcaggagaatcgcctgaacctgggaggtggaggttgcagtgagccaagatggtgccactgcactccagcctggacaacagagtgagactctgtctcaaaaaaaaaaaaaagaaagaaaattagttaggcatggtggtgcacacctgtagtcccagctattctggaggctgaggtaggaagactgctcaagtctgggatgcactctggcctgtgtgacacggtgagaccctgtctttaaaaaaaattgatttgaatggggaaaagttttcagaatttctcagtttggtccccctgaagtagtttcggtagttaagtgttttaagactgaattcccagcgttttaatgttttagggtactagggcctccataacaaataccacaacccaggtggcttaaacaacagaaatttatattctcacagttctggaggctggaacaccaagatgaaggtgctggcaggtttgttttattttaaaacctctctcctttgcttgcagatagctgcctttctgttgtgtcacatagcctttcctctaggggtgcacatccctgatgtctctgtccagattttgggattgattgattgattgattgattgactggagacagagtcctaaaaattttttttgctgctctgttgcctagcaggctggagtgcagtggtacagtcacacgcctcactgtgtaactcctgggcttcaggaatcaatccttccctggcctcccaaagtgctgagattatagatgtgagctactgtgcctgccttcctcctcctataaggacatcagtcagatcagattagagcccaccctacttgccccatttaaatttaatcattcctttaaaaagtcttatctccaaatacaatcagattctgagatactggggattagggtttcaacctttggattttggtgaacgggacacaaatcagcccataacagaggtttagctttttaaaaaatcaacctgactgctctatgaagatgtaactgaagtatctaaattattcacgtttcctagctaataatcacaagaagttgtcagaatttggaattagaaatggcagccggcttcaagcagatgacttcctccaggactatactttattgatcaacatccttcataggtaagagctattagtattttaattgtaagaaattatttgaatatataaactttagacaaaatgaaggaaaagtgttttcttatccttaaaccctgctgttcatttgaaactgtatagtatatttggttgagttggtcactgagttccgtgatgtttgacctacagaaaaatttgaggattcagaaattggcggggtgtggcggatcacctgaggtcaggagttcgagaccaacctggccaacacggtgaaaccccgtctctgctaaaaatgcaaaaattagccgggcatagtggcaggcgcctgtagtcccagctacttgggaggctaaggtaggagaatcccttgaacccgagaggtggaggttgcagtcagccgggatcgcgccattgcactccaacctgggagacagagtgagactccaacttaaaaaaaaaaaaaagaaaaccagaaataaaagaaataagcaaaaaatgttttaagagtaactgtcatcagtggtggcttatcagaaagacctagagtccaggtgtttgaacagtttaaacagaggcaaattcattgtagtaattaaactggaataaaattattaattatttttcaaggttctctagaaaaaaatatttcttccataaaacaaatcatttcgtttgtgattttgtggcaataacaaaagaatattgggaattgtctgtactggctgggcatggtggctcacacctgtaatcccagcattttgggaggtcgaggcgggtggatcacctgagatcaggagtttgagaccagcctggccaaaggctggtggtggcgcatgcctgtaatcccagaaacttaggaggcagaggttgcagtgagccaagattgcgtcattgcactccaggctgggtgacaagagcaaaactccatctcaaaaaaaaaggaattgtctgtacagattcctgagtctatagcacagttaagatagacatggccccctattctgatatattcatgtgttgaccagggtgcatttttgttcatgctcattgacatggtggaactgtgcctgacttgagatttatgggtagcatctaacaaacataaagggtttagtggtgctgccacctgcgtccagttattttgtcaatattttcatgagtatacaaacatgcatagtgttggtgtggttatttggagagaactacatttcatactttgtttataaaaagcataaaatgacaggaaggaggccaggtgcgatggctcatgtctgtgatcccagcactttgggaggctgaggcgggtggatcacgaggtcaggagttcaagaccagcctgaccaacatggtgaaaccccgtctctactaaaaatacaaaaattagctgggtgtggtggcatgtgcctgcagtcccagctactcaggaggctgaggcgggagaattgtttgaaccggggagccgagtttgcagtgagccgagattgcgccattgcactccagcctgggcgacagagggggactccatgtcagaaaaaaaaaaaaaaatgacaggaaggactgaatgtgagttattagtaagtagtgtatttcacagttagataatggagtcaaagtggtcctgcttcagttggacactagatataagtggcatgcttgttttcacttgtgaaagaaaagacagtggaaggacatgtacaataaagtggaaataccacaaggtatctaaaagaggaggcataattagggtttttaatcatattttttagctctctgggaacagaaccccaccccttaaaacgtgtgtcttttgtttgacttaaatgtttctgatgtttttgggagttcatgtacagaagcatggtgtagcttgtaaagatggggggacccagaaatcatgtagttctgcccataagacaccacattactatagttaagatcacattgtaggccaggcgtgacggctcacacctgtaatcccagcactttgggaggctgaggcgggcggatcacaggctcaggggttcaaaaccagcctagccaatatggtgaaaccctgtctctactaaaaatacaaaaaaattagccaggtgtggtggcgcgcctatagtcccagctgcttgggaggctgaggcagaagaatagcttgaaaacctgggaggtagaggttgcagtgaaccgagatcacgctactgcactctagcctgggtgacagagtgagactccgtctcgaaaaaaagaaaaagatcacattgtaagtagaggatgtagaaatctttttttggcattgtagctaaagaaataatgtccaagagttgctttaggccaccaagctttggacccagttttatgcttcagcaataaaagttatttactgttttaaagaaacaaaaaaccaaaaccttgccctgatttgaaagtgcatgtagagtttttgattatcacagaaatttgttgtgtaccgtcttttttattataagttcagtgctttgaaaattagaatccaaggtgggtatggttggctcacgcctgtaatcccagcactttaggagaccaaggtgggaggatggcttgagcccaagatttcaagaccagcctgggcaacattatgagaccctatctctcatttttttttaaataaaaattaaaaaaaaaattagaatccacatatttggtgtatacatagtgtatgctttgaggaacaacaggatttctctggtgctcctttgctttctaaatagtcatagcagtgacctgtgtgattctcctacagtgaagacctaggaaaggacgttgaatttgaagttgttggtgatgccccggaaaaagtggggcccaaacaagctgaagatgctgccaaaagcataaccaatggcagtgatgatggagctcagccctccacctccacaggtgagtatggccccagccagcaggttgttaaatacccacaaagcagaagtaaaaacaaactgattattaggaacattgaccataaatccataaaactactagaggtgtgtattggtttggtattgattgttgtaatggagctttgaatttatgaaccatgaagacatttaaggctgggtgtggtggcttacacctgtaatcccagcactttgagaggccaagatgggagtattacttgaggccaggagttggagaacagcctgggcaacacaatgagagacccccatctctacaaagaaaaaaaaaaattaaccacgcatggtagcgtgtacctgtagtctccgctactcaggaggctgaagtggttcacttgaacccaggagttcgacactgcagtgagccatgattgcaccactgcactgcagcctgggcaacagcaagaccatgtctcaaaaaaaaaaaaaaaaaagtcatttaaggcctggcatggtggctcacacctgtaaccccaacgctttgggaggccgaggcgggcagatcgcctgagctcaggagtttgacactaacctgggcaacacagggaaatcccatctgtactaaaaatacaaaaaattagctgggcgtggcagcatgcgtctgtagtcccagctactcgggaggctgaggcaggaggcggaggttgcagtgagctgggatcgcgccactgcactccatccagcctgggtgacagagcgaggcttccggctccaaacaaacaagtcatttaagactgggggaaattcttatggaaatttcttacagaaaataagaacactttgttattttttgttaattggtttttaacagtttgaaatgatagtttactagtgtgcaaagtcagcctatgtagtagcaggttggggttttgtatgcttgttttaaggagcaataaatccatgcatctgactattttgagtgaacaggtgcttgttaagtatggaatttaggcatgttagagtttccttgtcaccagtatgacttgggtatagtcctttcccctggattttcagtgctggtgcttggtatttttccaaataactgattgtttactgtattctgatttgaatatttactcctctccctttcttcctttagttaggaaactaaaggttaccagattttgacttctttgttttcatttctttgaccctatgtctgtggcattctttggaatatgtttactcttggctctaatgttctcttgagaattttggagacgaacattcagattatggcctgggtcattggttcataacctgttttttcccccctcactgaaattagaaaggtccgtcatcttcctttgaggaagagactatctggtagattttccaaaatcataatttgaaatgtacatttattgattctctactgtgggtaggtttccaaggttacagccatgagtaagataggtattctgcctttgattttgttggacgaggagataaaaccacctttagtatcagttctgcattggggatggttcctggcttcatcctctgctactatgtaagcttgggaagtcattcactgagtttcctttcctggaaagcagatactcatgtgatcttctttatagggttgtgatgattaaatgagttgtcatatgcacagtgctcagaacagttcctggcacattgtaagtgctgtattgttgttgctattgttaccactactaccattattagaatatgtaccctctgcttttctattggagaatgtggaggtagaatcaaggatgtgtaatgagtactttgagttacataatgcttgtcacaattttttgttttgattagaaaataaataggttcttatataaaacatttaaaacagtatggaaatacgtaatgtgtaaagtgaaaatgcagccattcttaagtctggtgtgtattagaagagtcagctttcaattatagaaaatacaggtgagcacaggtaactcccacgcttttacccattttctttttcccttttttctgaaataagctcaagagcaagatgacgttctcatagttgattcagatgaagaagattcttcaaataatgccgacgtcagtgaagaagagagaagccgcaagaggaaattagatgagaaagagaatctcagtgcaaagaggtcacgtatagaacagaaggaagagcttgatgatgtcatagcattagattgaacagaaatgcctctaaacagaaccctcttactatttagtttatctgggcagaaccagattgttatgtcctttgttccaaagggaaaaaattgacagcagtgacttgaaaatgattctgctccctttgaaagcattcattttgctagaactgttagacacattgcagtatgctgtattgaaagtaggaatatagttttaaaaaccctttgaacaaagtgtgtgcataaccagtcatgagataaaacaacacaatgcatgttgcctttttaatgtaaatacccgtaggtatcattaatagtttcaaaatattgtggtttagtaaagttgatacctggttataaatattatgcctttatttttggctagaagaagaattatttttagcctagatctaaccattttcatactcttaactgattgaaacagattcaaagaagtatcgagtgctatgcattgaaacttgtttttaaatgttagatggcactatgtatattaatgtaaaacaatgttaatttactcaagttttcagtttgtaccgcctggtatgtctgtgtaagaagccaatttttgtgtattgttacagtttcaggttatttatattcgatgttttgtaaaactcaaataacgactatacttatggaccaaataaatggcatctgcattcttgttacacatgcctgcacagttcctgtttctgctgccttatatctactgcaggaatgtcaaattcttttcattaaaaaaagaactcggtcgggcacggtggctcatgcctgtaatcccagcactttggaaggctgaggcaggtggatcacctgaggtcagtagttcaagaccaacctggtcaacatggtgaaaccccatctctactaaaaaaaaaaaaaaaaattagccgggcctggtggcaggcacctgtaattccagctactcaggaggctaaggcagcagaattgcttgaacccgggaggcagaggttgcagtgagccaagattgtgctattgctactccagccagggcgatgagtgaaactccatctcaaaaaaggttcagaagatctccactgtttgccaaagacgagtactttcttttctttattcttggagacttcacatgtaggaagagtactttctaaaataaagctcttcctgcgtgtggtggtggtgcacatctgtgttccagctactcaggaggctgaggcaggaggatggctggagcccagaagttcaaggccagcctgggtaacatagcaagaccctgtctctaaaaaataagtaaataaaataaagcttttaatggcagtgggttttttgttcgtttttgagatgaagcctcacactgtcatctggcctggagtgcagtggcgcgatcctggctcactgcagcctccgccttccaggtgcaagcgattctcctgtctcagcctcccctgtagctgggattacaggcgccctccaccacgctcagctaattttttgtatttttagtagagatggggtttcactatgttggccaggctggtctggaactcctgacctcgtgatccacctgcctcagcctcccaaagtgctgggattacaggcgtgagccactgcgcctggcctaatggcagtgtttttaaaatttggattgtcagcagttggcctttgttgagaaaatgtgtgactttgcccaagcccagtaacttggagccttgaatttgagatgctggaaagggagtccttcctcctttctgcagtgtttgtctgggttgtcccctagtttaccaaagtccattttgaatgtaccatccccagcccaactccagcctacagatagtgccagaccgccagtaggtggagtagcactgtcttcctggtcccggacctcagagggctttgcctgttagggtactcttatcactcagagatgggccttgagttttcagagaacagaaagccattaagctgtttcccctattgtattcatgtgccctttgtgtttctggcaataatttattttatatttcaactaaattttaaatttctaattcatgtattgttccttgtgtaatttgtactgtaccattcagcttattaaccattactccttgttttccaccatttgtaaattcagcatgtaatcagagctttcagaaaaaccatgtagaagactgggtgtggtggctcacacccataagccttgcactttgagaggctgaggcaggaggatcgtttgagcccaggagtttgagaccagcctgagcaacatggcaaaaccccatctctacaaaaaatacaaaaagtagctgagcctggtggcacttgcctgtagccccagctattcgggaggctgatggaggaggatcgcttgagcctgggaggcggggtgtgcagtgagccaagattgtaccactgtacttcagactgggtgacagaatgagaccctgtctctgaaaagaaaaaaaaagtcatgttgactaagactcagccttctggagccccagagtggagtgactttcacctgtgagcttcatctgcctttaggtttttagaaggtgtttaattttcctccagaaaataatttgaaacttaactatgtaatataaaatgaaatatcttaggatgccgtctcactcttcaaactttttattctgaaaagctctctagaaatttgattttgaaattctgtccattcttacacatcatcctgcctgcctttatttttgcagtggtgccgtcataggtcactgcagccttgacctcctggcttcaagcaattctccctccccagcctcctaagtccctggaactacaggagctcaccaccatgcccagctaatttttaaaacttcttttgtggagacggtctcacgttgcccaggcttgtctccaactcctggcctcaagcgatcctcccaccttggccttgccaagtactgggattataggccctgagccgcgtgccctgtcctcaccctgctttgtagacacagttaacaatgtgttcccgatattttgtgtatgttcttttgttctttcctatttgaatgtatagtgcatgatgataagtgccagttaggtctgcggagttgtttctaatttggcagaccagtgtttttcatctttgcattaactattactacctttttcagcaggtttgttaggaaggcaggtctgactactagttgcagggatcctgtacaactagacagtgtaccaaagcaaatccaagctttccctaggtgcctagagggtggagacacttcagatcttgtgttgtattcatggtttttccatgtaaattgtctcaccagctgggagctgggagtagggcttgcaaagggagtttcctcaacagcttctttccacctccagcctgaaatatggtgttgacaaactgtcttccagcctcacttggaacagtgtggtgacaagtttacctagagaatccattgtcctgaagactactggctgctcagcatgtgccatgagaggttccaacattttaacccattaatgagataactgaccaggcaaagatcactggatgccaaaacctttcaggtaaaaggctgctgaggaacagaattttagcacaacactcaaatgttgctgcacaggtcacttgcaaaaggaaaacatcaatctttacttattttagagaggggcgtctcgctttgtcccccaggccggagtgcagtgatgtgatcacagctcactgcagcctcgacttctcaggctcaagtgatcttcccacctcagcacccctgagtagctgggactgcagatgtgagccaccacgcctaatttggaaaacaccaatcttcacaattgacagatctgactgccgccaccataatcaagtgatcaaacctagtgtcacttatgggacggcctgatgtttctgtgcttcctaagatgataccaagaacacagcagtatctcaccaagaaattgttgactggaatctaaccaagcatctagacctccagctgacaggaaatggagagggggtagaggcacaagttaacatttagaaacaatcaggtgagcagaatatctgtgatattccgtaactgccagggctcttcagtaagtgtcatttcaaaaaaggaaggagtaggcattctggggttaaaagacatttaagagacaacccaatacaatgtatgaataattttttttgcatcctagttcaacaaaaatgactataacaattcttgtaacaattggaaatttgaaaatgaaacgaatataggtaatatagaattgttttcttcagtacgataatgtgattgtaattatgttctttttagtgtattatgggcaaatcttcaataccagcaactttttttttttttgagacgtacttgctctggtgcccaggctggagtaaagtggtataatcatagctcattgcagcctcaaactcctgggctcgagcgatcctcctccctcagcctcccacgtagctgggactgcaggtgttacgccaccacgcctggctaattttttcaattttttgtagaaggggttttgctctgttgcccaggctggtctgaaagtcctgggctaaagcgatcttccctccttggcctcccccaaagtgctgggattacagttgtgagccactgcacctttctcaggctatatggggaggaaaacagcaaaattaacatttattgaacctaggtactgtgtgtgtttcattgtaccattcagctttgaaaactttcataatagaagtgaatatatgtatatatatgcacacacgcacaaatgcatatatacatacacaggcagtctattttccttttgtgcctatttgacttttccaagttttatattgagtatgtcctatgattaaagtcagaaaggcaataaaggttattaaacatataaggtggaaagagaaagtgttagtgggattctgggctcaacactgttgaagtcagctttacccatccttcttgttgctaggctgtgacttaggaaggattctctttcatttgagcctccagagaactaagccaggtggttcccactagatgaatggcccactcagaggctgccagacagcatttagttgataatagatgttcctgaaaattgtccatcagtggcatacatgtctgacgtggacttggcctacacccaaggaacatggccaaatgtaagccacttaccagccttttgtaatatacaaaaaccaaaaatgtgggccaggtgaggtggcccatgcctgtaatcccagcactttgggaggctgaggcagatagatcgcttgaggccaggagttcgagaccagtctggccaacatgatgaaaccccatctctactaaaaaaatagaaaaattagctgggtgtggtggtgcacacctgtaatcccagctacttgggaggctgaggcatgtgagttgcttgaacccgggaggcagaggttgcagtcagctgagatggtgtcattgtgctccagcctgggtgacagagtgagactgtctcaaaaaaaaataaatacatgaataaataaataaaataaaaatgtgaaaagtaaagaaaacccaaaaagatcagagaagaaaaaatgtcagcagatgtttctagtcattgtgacatgtagaggtagggaggacctcctgtttctttgcattttaaagcaatattcctgaggtccatttgaccattttgagggaggatatatttagagaagtatttttatttcacactgggagcacattatttgcattgtgctcacagaaggaacattttctttttcctgcatccaattcaaaacacattgcatccaaaagcttatttgaaaaattttagaactcaaactaaaaaaattaaaaatcaacagttgaactacggggctacaacgccactgtgtagtttggctatgttttgaagacaattatctcctggtaaagtaacattttaggaagttttgctaaatgtctctgactcatgccagttttaaaaattttaagtctagcaacaagtgatgactcacagattgggaaagattctgagcaaaagctttaccagaacgtacagcgtctgagaaggtcctcaggctttgcactttagagtctttcaatggtttactttgattctcagatcaaccagtctcaggaaatttaggcactgtgcagacgatgtcattcagccattctgtcaacacaaattgcagtgctgcactcggtggaaaacgttaccactgttgccagcctgggtggaaacctttgaaagcacaatgaactaaagactggcgtgaatgaaaacccaactcctcatgtcattttgacagcagtaggtggtgagttggagatctgagcacccacaccctgtgtgctgccacactgagaggcagatgtcccagttggttatagcagcagcttccgggaggtttggaagtcataaacaccaacctcatactgaaaagcctaatgccaggttgggcatggtggctcatgcctgtaatcctagcaccttgggaggctgaggcaggaggatcatctgagcccaggagttcaagaccagcctgggcaacatagtgagaccctatcactacaataaataaaaaattagccaggcatggtggcatgtgtctgtggtcccagctacttgagaggctcaggtgggaggatcacttaagccaggaagttgaggctgaggtgtgatcacagcactgcagcctggccaagagagtgagaccctgtctcaaaaaataataataccaaaagctccattaatctgggcatccccaaataggtcctccccattgagctgtagattggctggggttttttaccatggtacaaagttagggcagaaattcccattcctgcgtgcatggtaaggcttcaagacaagaaaagagggcctttgccagatgcagtggtttgtacctggaatcccagcacttggggaggtcaaggcaggaggattgcttgagtccaggaatttgggcaacatggtgaaacctcactctacgaaaaacaacaacaacaacaacaaaaattagtttggcatggtggcatgcgcctatagtcctagctaacctggaggctgaggtgggaggatcactggagaccaggagctcgaagctgcagggagctgagccatgatcgcatcactgcactccagcctggatgacagggtgggatcatgttacagacacacacacacaccaaacaaacagcaacaacaaaaaacaaaaacccccatggaaacaggaaggaagcaagctgcaagtatcatgtcttagccttaattcttagattggttccccaatctatccatggcttcagtgatcaatgctttgaatcttcttgcatcctcaggcctaaaggggataacaggaccaggagagattgaagttaggctcaatctggcagaaagagtggggcctcagagaagaggggttgaaaaaattcccttgggtgcccagcctggtattatatttttgagtatgaggttggtttctatgactcttagagctcctggaagctgcctctcagcgtggcagcacacaggatgggtgctcagagaagaggggatggaaaaagccctcccagtggataggacagaacgtgcatcttgagcctggtgctgtgtgtgggaggagtggcccccaggagctgagctggaaaggtgtgtgtgcttcaggtgagagactggtgctggaaattcgacaagggtaaaaactgtcataggctaaggagaaagaagtgtgggtcccagaaacttcctgtggagtttggctgccattccccttccctcataacccgttatccagtcacagctgattgataagtggcctaggactccatgagaaaacccctgaattctgtcaatacctggggtccatacagtacagacaattaaggaggtctaatggaagctagattacaaggaggggcatgaggggctccttaaaaaatcaccattgtaggctgggcttggtggctcacgcctgtaatcccagcactctgggaggccgaggcgggtggatcacctgaggtcaggagtttgagaccagcctggccaacatggtgaaaccccgtctctccaaaaaaaaaaaaaaaaaaaaaaaaaaaaaatatatatatatatatatatatagacacacacacacacacacatacatatacatatatatacacatatatatacatacatatatatacacacacatacatatatatacacacacatacacacacacacacacgtgcacacacaaaagttagccaggcatggtggtggatgcctgtaattccagctacttgggaggctgaggcaggagaatggcttgaacctgggaggcggaggttgcagtggttgcggtgagccgatatcacgccattgcactccagcctaggcaacaagaatgaaactccgtctcaaaacaaaaaacaaacaaaaaatcaccatggcgtggacagagtctgggtagggtcagctcctgggttctgggaagatgatgatgatgatggttcaggacatggtgcaagactagattgaacatgtcctgttctggcctccaagtgtgtctttgcttaacaaagggaagaccagttaacttgagaggatgataaactggaagccacagtgtagtgaaacccctcctttggaacagtgggactcaggcagcggtgtgtggagccagcttatcccagcttgcaagaactggttatacccatttctttccagctcagttcagtggccccatctttatagcttgaaattggccatgctgggagtatttataccatggtaattggcaaatgctacacatcagggctcctgatttatacaaattcctccccagagagctggttgttagacatttaccagcacaccactggactcaggaggaaaatgcccagagagaggtgaacacaaagaacattcctgcaacaggggaggacagagggggaatcagtgggggctggacattgagtccatggacagtgctttaaatcccttgagagagccccatccccatccttctcctggactgtgcatctcagacagaaggagccagtctgttgagatcactcaatacccctggagtgaggagatagaagatggggtcagggggacatttgggtaatgtagagatgagaccccacaattctgcagactacttcaaatccacctaacatcacaatagtctgattcccaagccattcattaaatcttttgaatataactgcttaatgtatttcccacttcaaggatgtacttaaactattctaatggtaaatatcaaacattttaggttgtttctgggttttgtagttgtcatttattactagtagagcaagtaataggttttagctgaccctggatgtgaatatagtttaaatcttgaaagctctaagtgggcaggtggggaaagaacagttgttattattattattattattattattattattattattattattattattctggaggcagggtattgctgtgtcacccaggctggaatgcagtggtgtcatcttggctcactgcaacctctgcctcctgggttcaagcgattcttgtgcctcagcctcccaagtagctgggattacaggcgtgcacgactacacccagctaatttttgtatttgtattttaatagagacagggtttcgctatgttggccaggctggtctcaaactcctgagctcaagtgatccgcccgtctcagcctcccagtgttctgggattacaggagtgagccaccgtgcccagccagaacagttattaaatacttgactttattgtttttgtagagacagggtcttgctctgtcacccaggctagagtgtggtggcacagttatagctcactgtaacctcagactcctgggctcaagtaatcctcccgcctctgtctcccgaacagctgaactacaagtgcccgtcaccgcgccagtttaattttttgttttttattgtagagatgaatctcgttctgttgtctaggctgaagtgcagtggtgccctcactgctcactgtagccttgacctcctgggctcaagcatcctcccgccttagattcccaaaatacctgggactacaggcatgtgccaccattggcagctaatttttaatgttttgtagggatggaatctcactatgtttcccagactggtcttgaactcttggccttaagcaatcctcccatactggcctctcaaagcactgggattacatcacactcagcccaacagctgcctttaaatgcagagagctccctttgagcatcttttcagaaggctggagatcctaggacagaatagatcaggggtccccaacccctgggccacagaccagtataccaccgcctgttaggaactgggccacacagcaggaggtgagcagaggcgagggagcattaccacctgagtcccaccacgattctcacagaagcacgaagcctattgtgaactgcgcatgcgaaggacctaggctgtgtgctccttatgagaatctaatgcctgatgatctgtcactgtctcccatcacccccagatgggaccgtctagttgcaggaaaacaagcacagggctcccactctttctatggtatagtgagttgtataattatttcattatatattacaatgtaataataatagaaataaagtgcacaataaatataatgcccttgaatcatcctgaagccattcccaccctccccatccctgtctgtggaaaaattgtcttccacaaaaccagtccctggtgccaaaaaggttggggaccgctgtagattacctaaatgatgttgggattatacgacacggttgtgattggattattgtctgcatttttgataacttcccttgaatagatgtttagcagcagtattactgcttctaagtttcgtgttcgtttgtgcggatgttgacaccgccaaactgctcttcccaaaaggatatcccaatttgcactcataccagtagcatatgtgcaactgtttcaccacagtcctgccaatattgtaatttttaaatagtagataatgcagtccatgaaatgtgatatgactgaactggcttttcctttctcatttgaaaggtagaccatttttcatgtcctggcttccctgggtatttgctctcccaaatgctggcttctagaccccgcacggagtctcatgcctgtaatctcagcgttttgtgtggtggtgtgcgcctgtactcctacgtactcaggagtccgaggtgggaggattgcttgagcccaggaggttgagactctggggtgtgtgtgatcactgtgagctgtgatcacaccactgtactccagcctgggggacagagcgacaccttgtctgaaaaaaacaaaacagcgcaactcccccaccctccgcgcacacgaaatgcttgcttccacttcccctaccctggtggggcaggggctggaactccgcaggctatgggaaggtgctggggttagcggccccagcgggtgctcagtggtgttgaggccacactgccctgggcggtctggccgggacagttcccgtgcgggctccctgcgcgctgagccactgtaggcgccttcccgaaaatctctgagcagagagggcctggaaaacagtactctctcacgcaacacttttcttggatccatcaggccctgacagataacggtttggttttcttccctatagccgtgtgacttgtacaagggattttagttgtgtccttgggcacgaagccctagtcacctctcgattccccacctatgtggcccctatggccccgctggttccaggacctcccctcgaagcctcacccaccaccctggatgcaggtgctggaaaagggaggagtccccatatttcacggggactgcctgtgatggccacaggggaggctcgccgcccaccggctctgagcctgaggcctgcttctagcctggccttgggggcctgggcgaagcgacccagcgcgaggaccagtccccaaccaacccgctcctagttctgggcgccttccccagcagtcagatgggggcttcagaggccggtgcgcggccacatggccccgggccaggcagggggtcgtggggacgcatctgcgctaggcgcacagtattcctgggcgcgggacgggcgaagcgccgtgggttccaagctgagctgggtcggccctgcagcgccggagagcaaggcggcgcagggaagggagatggggcgggatgtggggaaagctgtcgactgcttggatctctccggcccggatggcgccagctgcctccagctcagcctgcggaaatccgagctcttcccagcggcccgacggcccgggcgccccgcagaccctgggctctccccgcggtgcctccgccgcccgcccctgcgtcctggcccggcctccacgcccctccgaggtcccggcgcagcgcggccgccgccactccccccacattccagaggccgcagcgccgtctccttcctcgcattcctgcccccgcaaaggagtccctccgccccgcgcgaggccgcggcgaggagggggcgcggcccggcgcctgggagcttacattcctccgccgcgcgcgccgccgagcagggcgccgcgtcccccggcccgcgcgtggccgccggaacgaccccggcccggcgccggccccgccccgccccgcgcccaggggtcccggggcgggctccgggcttcgggcggacgatgcggcggcccggccggagcggcggcgggaagcggaggcggaggtgacgcgccagggccggcgggccgggccatgcagcgctccagggcgggcgcggacgaggcggccctactcctggccgggctggccctgcgggagctggagcccgggtgcggctctcccggtcgggggcggcgggggccgcggcctgggcctggagacgaggcggcgcccgcgctgggccgcagagggaagggcagcggcggccccgaggccggggcggacggactgagccgcggggagcggggtccccggcgcgcggcggttccggagctcagcgcgcagcctgcgggcagcccacgggccagcctggcggggtccgacggcggcggcggtggcggcagcgcccgatccagcggcatcagcctgggctacgaccagcgccacggcagcccgcgctccggtcgctcggacccgcgtcccggtcccgggccgccttcggtgggcagcgcccgctccagcgtttccagcctcggctcccggggctcggccggcgcctacgctgacttcctcccgcccggcgcctgccccgcgcccgctcgctccccggagcctgcggggccggctcccttcccgctgcctgcactcccgctgccccctggccgggagggcggcccaagcgcggccgagcggcggctggaggcgctcacccgggagctggagcgggcgctcgaggcgcgcacggcgcgggactacttcggtgagctcgctcggcccggcagttccctgcgcgcatggctggggtccggggttccgagactgcctcgggtaggcggccggatcagcggaggagagcacggggctggctgggggtgcagcagtgcacggggttgggacgaggaaggtgcatcccctggggactggggagcgcaaagggtgagtgagtgcgcctggatccccagcagcggcttcacccctgcctctgggtcccccgacacacgaggggttctggccgagtgagttgatgtgcggttcctaacttaacaggcaagtcaggttcatgggcacactgagccattttctgataattttttcttctttcttcttttttttttttctttcttcttttttttttttttttgagacagggtcttcctctgtcgccgagactggagtgcagcggcgcgtcctcggcttactgtagccgtcgcctctcaagctgaagcgatcctctcgcctcagcctcccgagaagctgggactacaggtgcacaccaccatgcccagcttttcttcttcttactttttttttttttttttttttgtagagacagagtctccctatgttgcccaggctggtcttaaactcctgggctcaagcgatccgccctcctcggcctcccaaggtgctaggattacaggcttgagccagtgcgcccggcctgatcttttcttctttgcgtttggtgctctcattctatctgatcctttcatgcttcgtgatgagcagaaaggggtgcttccccgtctgccccgccacggtatgggtgtggacagcaaccgggagatggagtggcccaggtaccaccggataccgcctgacccaggctttggtgatggtagcggctggagagggagactgtgtgagggaagaaaagcccactttgcgggagaggggaaccgtgccagtcacacggggctgccctcgcccggactgtgctgtggacataggatgtttcctaaaggaatcctgctgcaggtgcatctgcaaagcccagcagcctcacagcctccacttcccagtgtggcccaggccccctgatctctagttcttgggacagctcttggggtgagattgtgagcggggcagaggtatactgtggggcctggggcgagaacttcccaacccgccttctgtattaagcacctggctttggtggatggatggtcaccatgcctgggaccgtggctgtcctggggtttgtgtctttgagcgttcaatggtgtcagcagctcacggctgccctgaactggatcttttttttttttttttttttttttttttgagacggaatctcgctctgtcgccaggctggagtgcagtggcgtgatcttggctcactgcaacctccgactccctggttcaagcgattctcctgcctcagcctccccagtagctgggattacaggcatgcgccaccacgcccagctaatttttgtatttttagtagaggcggggtttcaccatgttggccaggatggtcttgatctcctgacctcatgatccgcctgcctcagcctcccaaaatgttgggattacaggcgtgagccaccgtgcccggccctgaactggatcttgaggggtgaggagtctgtcagtgaggggccaggtgggggcattccagagagagggaagaatgagcagaggaggccaggcgggatgagagattgccccgctcttccccctggggttgcagcccagagggctcaggtggtcgagggcatatgtgggctaagaggaggtgcgcctgctttgggatggagagcgcctcccatctgtgaggtcatggtgagactctgtggctgggcaggtctcgtggcgcctgttggatggcctgggagcagggagatgtgccaggagctgtcatctcccgtgtcaggcaggtgccaggaagagaggctggggctgagttttgaagggcatgctttccagtgccctctgcaggggagagtgcccatttcccggcccctgtgtactgcagagcccgggggaggggggtgttctgtagacacccctgaatctttatatgatataggggtggctgaggtcccaggcaggtaatgtggagatgatacaagaaggtagggtgtggtggcacattttttttctgaggagctgctaggccgggtgcggtggctcacacctgtaatcccagcactttgggaggctgaggtgggaggagcacttgaacccaggagttccaggctgcaacgagctatgatcgtgccactgcactctggcctggatgacagagtgagatcctgtcttttctttaaaaaaaaaaaaaaaaaaaagctgctcagatcgggctgttgtagcgccctgagagtgttagaggagtgatgatagaccttttttattttgttttcaagaaaaactagaaattgagattcagtaatactttcctgattttgtttactttatttttttaaacttttttgagacggagtcttgctctgtcgcccaggctggagtgcaatggtgcgatctcagctcactgcagcctccacctccgggttcaagtgattctcctggctcagcctccccagtagctgggattacaggtgcgtaccgccatgcccggctaatttttgtatttttagtagagatgaggtttcaccatgttggccaggcttgtctcgagtttctgacctcaggtgatccacctgcctcggcctctcaaagtgctgggattacaggtgtgagccaccatgcccggcccactttcctgattttaaaaaatatgggcaactatttgtttgaactatatggttctgatgatatttgactttgttgagctacaaaagtggcagtttcatagagttcaaccagaataatacagcattttacaaaagaaaatctgcaggtagcataagctcgagtgatctctgataaacctcgtcctcagagtgtggcttttttgttttaaattaatttttttttttttttagagacagggtctcaccctctcacctaggctggagtgcagtggtgagatcagcgctcattgcagccttgaactcctgggcttaagcaatcctcctgcttcagcctcctgagtagctgagaccacaggtgtgcatcaccatgctcggctacatttttttatgttttgtagacctgagatcttgctttgttgtccaggctggtcttgaacttctggattcaggcgatcctccctctttggcttcccagtgttgggattacaggcgggagccactacgcctggccagagctttttttctctctgtccaacccctcatctcttcctgtccttggccctggtaccagctgacctcttggttgctctctgccattcactgatgtctttggaactttcccctctcccctccccaagttccgctgccattagccagccaacagccttgggcttccggaaccttttcaactttggtgacctccttgccttctcttcagccacccactcccagggccacaccgttttcccttcactctagcagtccttagtggtaactccagtctgcttctcagcagttcctctcattcctgtaatcgccgtctgcccagcagaaccccgactctgagcccatgctttgaccccctctgcggccactataccaggctgggaagggctctgaggaacccctcaggactgtgggaggtttgtcatcctcaccacgcaggtcttcctgtcaccactgacaccctaagcctttgtcagtttgttttttttttttttttgagacagagttttgctcttgttgcccagggtagagttcaatggtgagatctcagctcaccgcaacctccgcctcccaggttcaagtgattctcctggctcagccttccaagtagctgggattagaggtgcccaccaccacacctggctaatattttgtatttttggtagagacagggtttcactgtgttaaccaggatggtctcatctcctgacctcgtgatctgcccaccttggcctcccaaagtgctgggattacaggcgtgagccaccgcgcctggccgcctttgtcagtttcctctcttattctctcaacaaccttcctccctcctgggacccctacctttgcttctgacttcccttggaatcttgaggtcagcagttgtagtctgtcttcaccaccgtcctgccccttccctgtaggtgctccagtccatgtgggtctgactctcctgccgtctgagaggacaagggtccttccatcaccaacctccacctcctgcaccttcagttctcctcttttcattggccccttccctttgtttctttttaattttttttttttagagacaggatctagctctgttgccaggctggagtgcagtggtgcgatcacagctcactgcagcctgaactcctggcctcaagtgatcctcctgtctcagactcccaaagtgctgagattacaggcatgagccaccaagcccagtccctgcctgcttttttttttttttttttttgagacggagtcttgctccgtcacccaggctggagtgcagtggtgtgatctcggctcactgcaacctccgcctcccagatgcaagcgattctcccacctcagcctcccaagcaactgggattagtgtccaccaccacgcccggctaatttttatatttttagtagagatgaggtttcaccatgttggccaggctggtctcaaactcctggcctcaagtgatcaaccctcctcggcctccgaaagtgttgggattacaggcgtgagccactgcgcctggcccctgcctggttctgaaggcatctgaactggctttctctgcccagtggtaaagtgaggcatgggaggccctgggcagagcagggggtacccaggaaagcaggaagggagatgaagacccagaaagctgggtgcaggctgcatcctagaaaccagagaggaagaggtgggccacccgatagcaagatcagaatggaaagtccatagatggggacggctaggagatgaccaagtgtgggccatgttctctttgttgactgaggaaaggcggggaatggggcggctggtggaggagggagaggaggttatttaaggagagagatgaaaggagaaagcaagaaggtcgggggagggcagcatggcctggagctggcagaagatttacggtccagagggcaggtggaggccatcttcatgccctgtgtggcatgggaggccctgggtgaccctgtaaaggggacacgagatgtatgggctacttgcctactgtctgggtttccaggagggctggccagggagtgccctgaggctagagccaggcttggccctggcgttgctggtcacccctctcctttccaccttccccgctgcatgctgagtacacaggtgtggtccctgattccatccactgatcataggcacctgcacagcagcgaccctcatgtctgtctgcttccttttttttttttttctttgagacggagtcttactctgtcggccaggctggagtgcagtggcgggatcttagctcactgcaacctccgccccccaggttcaagtgattctgctgcctcagcctcccaagtagctggaattacaggtgcctgccacctcgcctggctaatttttgtatctttagtagagatggtgtttcactatcatggccaggctggtcttgaactcctgacctcctgatccacccacctcggcctcccaaagtgctgagattacaggcgtgagccattgtgcctggcctcttctttttttggagacatctcactctgttacccaggccggagtgcagtgacatgatcatagctcattgcagcctcaaactcccaggcttaagtgatcctcctgcctcagactcctgagtaactgggaccacaggtgcatgccaccatgcctggatatttttaaaaatttttgtagagatgagggtctcgctgtgtttcccaggctagtctggaactcttcggctcaagtgatcctcccacttcggcctcccaaagtgctgggattacaggcatgagccactgcacccagcccgcttccttatttccttcaggcctttgctcaagtatcacctggtgagtgaggcttctgtgaatacctggtttaaaaatcacacatccttggccgggcatagcagtacctgcctgtggacccagcttcttgggaggccgaggtgggaggattgcttgagcccaggatgtcaaggctgcagtgagctatgattacaccactggactccagcctgggcaacagagcgagactctcctaaaaaaaaaaaaaaaggccgggagcagtggctcacacctgtaatcccagcactttgggaggccaaagtgggtgaatcacctgaggtcaggaatccatgaccagcctggccaacatggtgaaaccctatctctactaaaaatacaaaaaattagccaggtgtggtggcacatgcctgtaatcccagctactcgggaggctgaggcaggagaatctcttgaacctgggtggtggaggttgcagtgagtcgagatcacgccactgcactccaacctgggcgacagagcgagactctatctaaaaaaaaaaaaaaaaaaaaaaaatcctgcatctaacgccgtagcactcgtctctgcctgacgttatttgactgctgttctctgccaccttccactcgatgcaagcttcttgaaggtggggacctgggtgcattgcagactgagtggtgcctgaccttaggggcatgtgactcatctgtgtgctgactgaccaagagaataagtggaccctggcatacagaggaggacagagtgggtacagaggaggacagagtgggtacagaggaggacagagtggctgcagaggggtggtgactgcccctgagtgcccatgtggtcttcattctttgtgtctgggtcacaaaacatgttgaagaacaggatttggttcacaaacagcatgaaggattttccctcagtccaagagcaggccatggatgaaagggcttaaagcaactgtcttggtataaagataccatgataggctgggtgtggtgactccacgcctgtaattgcagcacttggggaagcccaggcaggaggattgtttgagcccaccctgggcaactgggcaacacagcaataccctgtctctacaaaagaaaaaatcagccgtgcgtgatggcatgtgccagaagtcctagctacttgggaggctgaggctggaggatcgcttgagcctaggaggttgaggctgcagtgagctgtgattgcaccactgcactccagcctgtgggacagagcgagatcctgtctctctcccaaaaaaaacctaaaagtggttgggtgcagtggctcatgcctgtaatgccagcactttgggaggccaaggcaggaggatcgctttaacccaggagtttgaaaccagcctgggcaacatagtgagactctgtccctatttataaatcaaaaaccaaaagaatctatcagaacagttgtgatggacagctttgattagctccgactctgccctgggtgctcggccaagcccttgaatcctcagacagcagcagcggcaatccctgggtcgtggccaccctgatggtgcccatgttggtcatcagtaatcgagtgatgttggcctaggaaagttagcatcccccaggtcaagcgggtgggcggtgtcaagacggggagtccgtcggtgtggcataggctgtggcgctaacccctgctctctcctgcctctcctctcctaggcatttgcatcaagtgtgggcttggcatctacggagcccagcaggcgtgccaggcaatggggagtctttatcacactgactgcttcacctgcgactcgtgtggtaggtaacctcgtgccctgggtagctctgtgaaggggacctgccacatcatccccattcccctcaaactgccttgcccctgagtccaggcagatggaccacctggctctggcccaggctgggctgtggaggactctgtctggggaggaggcatggggcccctgaggagccttttgctggctgtaggacagggctgccccctggtcgtcagctgtggatcctctgtgccacgcagggcactaatgcgctcatgtcacccagctgcctgggagcagcgtcagaagcccatgaaggaccttctgcctgtctggacatacgactaatatttctttttcctgctatctatttttgttgttgttgttgagacagagtcttaatctgttgcccacgctggagtgcagtggaatgatctcggctcactgcagcctctgcctcccggtttcaagagattctcctgcctcagcctcccaagtagctgggattataggcacacgtgccaccacgctcggctaattttttttttttttttaggtagagatggggttttaccatgttggccaggctggtctcaaactcttgagctcaagtgatccgcctgcctcggcctctcaaagtgctgggagtacaggtgtgagccactgcgcctggcctacaatttatttttgatcataattttacacccaacataaactataagtgttatagtttaacctagacaaagttataaaaagaaaaaaggaactataatccaaccaccctaataaatatccactcttggtttgcccactgttcttccagaccttgccttaatcagacatcttttatgtatttgcacgttttttaattttaattttatattttttttttgagacagtctcgctctattgccagactggagtgtagtggtgtgatctcagctcactgcaacctccgtctccctggttcaagcgattcttctgcctcagcctcccgagtagctgggattacaggcacacgccaccactcccagctaatttttgtatttttttagtgagatgggatttcaccatgtggccaggatggtctcgatctcctgactttgtgatccgcctgccttggcctcccacagtgctgggattataggtgtgagtcaccttgcccggtaaaataccctagaaacttctatcttgtacccccacttgttttttgagacagagtctcgctctccccgaggctggagtgcagtggcgagatctcggctcactgccacctccgtgtcccagtttcaagtgattcgcctgcctcagcctcccgagtagctgggactataggcgcgcaacaccacgcccggctaattttttgtatttttagtagagatgtggtttcatagtgttagtcaggatggtctcgatctcctgacctcgtgatccatctgccttggcctcccaaagtgctgggattacaggcgtgagccaccgcgcctggccctatcttgccctttttcagttgatccctgtatgtcccccatcacatttgcccaactggtattctgatttctaccactgtagaaaagttttgtccattctagaacttaacataaatgcattcctatagtgcatactctttaatggctgatcttgtgttcaatgtctttttttttttttttttttttaagaagcagggtcttatgtcttcatccaggctgaagtgcagtggcccaatcacggctcactgcagccttgacttcctgggcccaagtgatcttcctgcctcagccccacaatgagtagtgggactacagacacgtaccaccacgactggctaatttttttttttttcctagagacagggtcttgctatgttgcccaggctggtcttgaactcctgggctcaagcgatgctcctgcctcagcctcccaggaggctgggaggctgaggcaggaggatcacttgagcttgggaggttgaggctgcagtgagccatgattgtgccattgcactccagcctaggtgacagagcgagaccctgtcttaaaaaaaaaaataccagcctggccaacatagtgaagccccatctctactaaaaatacaaaaattagccaggcacctgtagtcccagctacttgggagggtgaggcaggagaatcgcttgaacccgggagtcagaggttgcagtgagccaagatcacgccactgcactccagcctgggcgacacagtgatactctgtatcaaaaaaaaaaaaaaaaaaagattcattcccgaaaatttgctgtgaattcaactgatcttcaagtgaatgtgtttattaaccaacacatgtatttacatgagcaaaatatttattcatatatttgttttggcaacctttttaaataactctgtcgacaatgtgttctgtttaatttttttctgaaattttgttattataacaataacaacataatattaaagggaaatttagaaaaccacccataacccagtgtctcatctgttggaggagggtgctgagagctggaagcacggctccatccctggtccccagcgttccagggacccctctcaaccctcacccttgcagggagacgactccgtgggaaggcgttctacaacgtgggtgagaaagtgtactgccaggaggacttcctggtgagtccaagctgtgccctggcagtgccaggggtgggaggtggggcagggaccctcattctgactcgagtggagacctgaggccaggaggcaggtgctagctgggccgcgagtgcccctttgtcacacaatgtcctggatcctgtgtcccctcccagtactccgggttccagcagacggccgacaaatgcagcgtgtgtggacatctcatcatggaaatggtgagcccctgccccagcctcctggagcccctctgacgtgggtggagtctgaggactctaccgtctcccctgctccagacctgccaggggttcagggccagagcctctcccagggcggtgctgagcctcctgcccgcgctgacccctcagtgtgccccgcccacagatcctgcaggccctgggcaagtcctaccacccaggctgcttccggtgctccgtgtgcaatgagtgcctggacggggttcccttcaccgtggacgtggagaacaacatctactgcgtgcgagactatcacacgtgagttgctggtgctgtggagcaggcgggactcgggccgtcctccctggctcctctggaagcatttttttcctgctggactgactgccctttgttcttggccttttgccttccgcctccccttgtacacctgggcttggggcaggcatgtgtctctgcctgcatcccctctcctggtggtccggccaccagctgtcttttgcctcttctctccctatcgtggcctgcatgcttctctactcctggcacaggggaccctcctggctgcagtacccaccatctttccccctcctcccctccatcccctgccaggccaggcctctttcagctggggcaggggcttgggatctctgcagcccccttctcctgcctgtctgatccctgatctgtttcctcctaccgtgactccaggtttattcctgggagctctggttctgagcagggccttccgtgggattggagtcctgggcagaggtccctggtactcagggtgaagccaggtctcacagtggtcctagctagtggtgtcccagacctggacattaagaactcacaggaaacatgggggcagatggcagagcagaacctgaaggcatcctggaggaggtgattgggtggagatgaaatgagcagtcagataagaggccagggccgggcatggtggctcatgcctgtaatcccagcactttgggaggtcgaggtgggtggatcgcttgaacccaggaatttgagaccagcctgggcaacatagtgagaccccatttctattaaaaaaaaaaaaagaagaggccagtacaggaaggcatggcagaagctgttccctgtctgccccgaggtgtgcacacagggagagagggcctgatacttgggctacgtcagtgggttcctgtgggtgcccctgtgcttgtgcccttggcctctggtcactcagctgatcacttctggtttcctttatttctctagggtttttgcaccaaaatgcgcctcctgtgcccgtcctatcctccctgcacaggtaggagccactcacccagagatgatcaggtgcctggcccagccggctgctgtcctgtctagcctgggtctagcccaggtcttgggcgacagtgggagggatgagcaggtgcttctccgcagatctttcagggctgagggatgtgtgttgtgcttgtgtacgtggggtacagctgtcccctggcacaaggtcgagggaagtggtggcccctgccgctcagctgccccactgccagcctctgctccattctccattgatggaagggccgttccctgggtcttctcagctctgcaggctgaggtgggggtgctgggggagcagatgagagatggacgtggtctgtgcgggagccacccatgggtgctacagctctcctggcctggggtcttcccacagtgctggctctgtcccaggctggtgtgcctggcaaagcagaactggcagtgcccttttgagactccaaggaagtgaaaacaggccgggcacaggggcccacgcctgtaatcccagcactttgggaggccaaggtgggatgattgcttgaagccaggagtttgagaccagcctgggccgcctagtgagaccccatttctacaaaaaaaataaaaaattagctgggtgtggttgtgcatgcctgtagtcccagctacttgggaggctaaggcaggaggattgcttgagcccaggagtttgaggccgcagtgagctgtgattgcaccactgcactccagcatgggcaacagagagagaccctgtctcttaaaaaaaaaaaggatcagtgaggtgaaaataatgtccacatccattgacaaacacgtgacactcttgtgggcctttgtgcgtactgtgggctgtgatcgtggaggacgcctaaggcccgcatgtgtctgtgtgtgtgcacctgctggagcctgtcccgccccacagaagcagcgtggcagtgctccccggggcgggcgtgcacctccgccgggacaggagcgtggtgtgtgggagtgtacactcacgcagtttgcctccagtccccacatgctcatcgtgtgtgaactccttctcttcctccagggctgcgagacaaccatccgtgtggtgtccatggacagagactaccacgtggcatgttaccactgtgaggtgagcctgggcccacaggaggctggcagctggggcaggcctcctcccacagggctctcctctctgggtgttctgtgggcttaccttatcaaaattttagttttgccaggctcggtggttcatgcctgtaatcccagcactttgggaggctgaggagggtggatcacctgaggtcaggagttcgagaccagcctggccaacatggtgaaaccccgtctctactaaaaatacaaaaattagccaggcgtggtggcgggcacctgtagtcccagctactcaggaggctgaggtaggagaatcgcttgaacctgggaggcagaggttgcagtgagccgagattgtgccattgcactccagcctgggcaacaagagtgagactctgtctcaaaaaaaatttttttttaaaatttttatttattagagacaagatctcactcttgctcagactggagtgcagtggcacgattatagctcactggagcctcaacctcctggctcaagctatcttcttatctcaacctcctgagtagctatcaccacaggctcgcgccgccacattcagctaattttgttaattttagtagagatggggtttcatcatgttacccaggctggtcttgaactcctgggctcaagcgatccacctgccttggcctcccaaagtgctgggactgcaacgtgagtcaccgcgccagcctcacctattttatggcgtctaccccattctacctgtccttttcctgccccgcagagagtgcactgggggagggagtgaaggcaggtgctccctgagcagctggaggagtcagggttgggggcctgggttcacagaggtgggctgagttgagtgatggttaggccgtagaaaggactggatttggcaagtgtctggatgtggggggttgggggttgggggttgggaggtgttcatgagaaccccagcaaagagtgagggcagggggaagaggggatgggatgctctcatttttggtagctggagatgtccagtagacctgtaagtgggcgggggttcagcgaccctgccgacagctgtgggaatttggggtcactggcgtgtggcgctctcttctctgaatctttttttttgttgagatgagtctcactccgttgcccaggctgcagtgcagtggcactatctcagctcactgcaagctccgcctcctgggttcaagcaattctcctgcctcagcctcctgagtagctgggactacaggcacccaccaccacacccggctagtttttgtgtttttagtagtgacagggtttcaccatgttggctgggctggtctcaaactcctgacttcaagtgatccacccgccttggcctcccaaagtgctaggattacaggcttgagccaccacaccaggccttcttttctgaatcttggccctgggaattccagttgccttggcctccccagattctcaactcaaggagaccacggggctcccctgggcagctggagcagtctccaggcagtcagtcgggtgttgtggggtacacttctcagatttcccctctctgagagatgatgggcctccctggtctgttgtccggggtctgagagtcactgtcatctgtttagcctgttgctctcgttgttaaaggtgggaggggaaatccaatttctcttcctccgttctggcgggaagcaagggtcccatgatggacacagggacggcagctgaagccagggagcaagtgaggtcttccaggatgagttggaaaagaaggagtgggggtcaggatagctcagggagcactgtcatttaaggacacacacaggcgaagtggccacaaagggagactgaggaggcctgggcaggagaaccaggaggctgccggcgaccgcgccccagcaagagcagagcaagtggcggtggggaatctgcagtagcaatcagggatcccttgggtgacaaggtctcctgggtgcaggcgagtggccccatgggagcaccgattgtgtcagggtacccaggagggaggacaaggagcagggatggtctgcagaggggccagggctcccctccagccctaacaggacctccgcgtccctccacttgctgggccgtcctgtggactgtgcggtcccctgcagattgtccagtaccgagggcagcaaaaggttgacgctgagagtgagagcggggcaggcggctggtggtggtgctgtgctgccgcgaggctgttggatggggactgatacctccgggaccccgcactcctccctggcctggtgtgcagcggtcggtagcagggcccagccagtggcctgtggtgggacagacaggagaccagggaaaggagtgatgtggtgtcactgcagcagcccagctcccttccctgcgcagggcgggccaggtgttggtgtcaggggctctgggtaacgggtcaaagccgccagcattccagccccgagcccgcaacggtaaaaactgcgagatagggtacttgaagcccgccccctgcttcccaggtcctctcaccattgcctcttcagaccacccgggggtggcattcatcccttcaccctgctccagggacccctgtgtggtgggaactggtggacacttccttccgggccccccagcagcttggagcacagggccgctccctcctccacccacttgcttcactttgccctcggggctgccaggttgtggttgtcttcactttcgtttctccttgagtctcttctgcccaggcctgttctcttcccacctcctcatggaaggttctgctgtttgccgtcttctcttttctagtgatctgcaccccctggaagaggtggtctcctgttttgtctttaaaaaccatcacgtgaccgggcgcggtggctcacgcctgtaatcccagcactttgggaggccgaggcgggcggatcacgaggtcaggagatcgagaccatcctggctaacacggtgaaaccccgtctctgctaaagatacaaaaaattagctgggcgtggtggcgggcgcctgtagtcccagctactcgggaggctgaggcaggagaatggcgtgaacccgggaggcggagcttgcagtgagctgagatcatgccactgcactccagtctgggcgagactctgtctcaaaaaaaacaaaaacaaaaaaccccatcacgtttggctgggtgcggtggctcacgcctacaatcccagcactttgggaggccgaggtgggaggatggttgtgaagccaggggttcaagatcagcctgatcagcatagcaagacgccatgtctacaaaatacaaggggaaaaaaattagccgggcatggtggcacatgtctgtagtcccagctgcttgggaggctgaggtgggaggactgcttgagcccaggagtttgaggctgcagtgagctgagatcgcaccactgcattccagcctgggcgacagagtgagaccctgtctaataaacaaaaaacaggccaggcacggtggctcatgcctgtaatcccagcattttgggaggccgaggtgaaggatcacttgaggtcaggagttctagaccagcctgagcaacatgaaaccccatcactacaaaaaataaacaaaattcacagggcgtggcagggtgcgccagtggtcccagctactcaggaggctgaggtgggaggatcacttgagccctggaggtcgaggctgcagtgaactgggatccagacactgcattccagcctgggtgacagtgagagaccctgtctcaaacaacaacaaacgaataaacaaaaaacacccaaaccatcaggtttttatgctgacacccatgttgactgctcagccctctccccgcagtctgacttatatccagtgacttcctcttggatacctgagaggcagctccagtctccagtgctccacgccgggcttcccataccccctctggcagaggaagagtctttttttttttttttgagatggagtttcgctgttgtcacccaggctggaatgcaatggcaggctctctgctctctgcaacctctgcctcccgggtttaagtgattctccagtctcagcctcccaaggagctgggattacaggcatgtgccactatgcccggctaattttgtatttttagtagagacagggtttcaccatgttggctgggctggtctcgaactcctgaccgaagcgatgatccagccgcctcagcctcccaaagtgctgggattacaggtgtgagcccctgcgcccggcggaagagtcttcatgttgttttgcggcaccctgcagatctgcccctcccctccgtccctcccccgtcccgtgacctctgatgtgcgcttgtctgctgactctggggctgggggctgtgttcttccctaggactgcgggctgcagctgagcggggaggagggacgccgttgctatcccctggcgggccacctactgtgtcgtcgttgccacctgcggcgcctccaacctgggcctcttccctcacccactgtgcacgtcactgagctctgagcaggggaaaacccgtccctgggccggggtgggtgtgggtgtggagggagggcccgcgtgggtggccctggtcagcgtcaggggagctccctccaatcagtttcccaccgagctgctgtctgcaggggccggacccccgcgtggaagcttctatttattcaccgtctgtgcctgctcaagtcacttccctgcgggccctgcctcccacccaccccatcaccagctttccacttggaggccccctgtgccctgcagcctcagggtaggccgtgggtcaccaggctggagagggcccctgccttggccaggggtgcgaggtgacccggctgcattgctgggtgggagctgctgtctgttgttcaggggcctggcccccgccctcccccccgaccccgacctcgcaaagcgcactcccgggcagggtgtggtctggaaggcggggctggcggggacatgggtgttcctgcatctcctagcgcagttcctgctggtgggtggaagggtgcctggtttaggcggggtcccaggagggggtgaggggtgacacccttggggagggggcctgcaaagggcactgcctgtggccacgtggtgtctgtgggaattggtcctggggactttgatgggtgtttgcggccccagttgccgccctgctccctcttccagggctcctggcttgggccccccgacccccctgctcagctcgggaaaatccccgtgcggctccagccccgggtcacgctcaggagcgatgagaggggcgccctggccacgcttcaggaaagcctgtgtctgcgcgcggggcaaggggctccacgacaaaaggacaagatttgacttaaattaagtttttcccttgaggatattttcattttctttaaaagaatataattttcttctaagatcttggaccagccttgttatttttaaagcaaatgccggcaaactcacaagtgtctagtttgtctgttacggagctggttttcaggtggtaagaaccttgtggtttcaggacttttgtcctgaaattcctctaaaacttcgccacgcgtgtccacctttcagactttagggtagtgtggggttccgtgtgtgtccgggtgttaagggcggtcgccccatgaaatgcagtgtggaggtccctccgtgctccccgggacacactgacgggaatgtggggtctggacatgggaggccctggtcctgatgcggaatccccaggggttcaggggacatctggactgaagtcactcgcccctgggagagcctggacccacctcttggctgctgctctccccttcctcccccaccgtcaggtgtgagttctgtgaatcactcgcggggctgggctaggctccgggaaccagcagggctgtccaggccgagcccaagggaacaaacaccaggaggcgcccgcagggaagtggcggcttcggagtccagcagggccgaggcatggcgcgggcgccacctggtgggctgagccggcaagtacaggggtggtcagggagccttagccagggacttacacagcgtggagagcgctgcatcttagagtggggccttcagcaggaccaggggccacttcttggaggaggtgatcccactggggccagagagtaaagtccaggcgtggaggctccggtgctggctctctcctgctagctgagctgctttttcttttcttttctttttttttttttgagacggagtgtcattgtgtcacccaggctggagtgcagtggcacaatcttggctcactgcagcctccgcctcccgggttcaagcaattctcctgctttagtctcccgagtagctgggactacaggcgcacgccaccacgcccggctaattttgtatttttagtagagatggggtttcaccatgttggtcaggctggtctccaactgctgacctcaggggcgatccacccacctcagcctcccaaagtgctgggattacaggtgtgtaccactgtgcccggctttttttttttttttttttgagacagggtctcgttctgtcgcccaggctggagtgcgttggcacaatctgggcctactgcaacctctgcctccagggttcaagtaattctcatgcctcagcctccccagtagctgagactacaggtgtgccccatgacgcccagctattttttttttttttttttttaaagacagagtctagctctgtcgcccaggctggagtgcagtggcgtgatctgggctgactgcaacctctgcctcccacgttcaagcattctgcctcagccttccaagtgctgggattacaagtgtgcgccaccaggcctggctaatttttgtatttttagtagagtcggggtttcaccatgttggccagactggtctggaactcctggcctcaagcgatccatccgccttgaccttccaaagttctgggattacaggcgtgagccactgtgcctggccttactttttgtatttttagttgagagggggtttcagcatgttggccaggttggtgtcaaactcctgacctcaagcgagcccaccttggcctcccagagtgttgggattacaggcttgagccaccgtgcctggcctgggctcctttgccttctaactggtcagttgcaaagctgtcctctgaactgtcctctctgcttcctccctcaaacctgctttgagccgggtttctccttgttgccaacccggtccttctcctccccttcctttgcatgtgccatggtgggccctgtgcttatatccatggggttgcttcactgaaccctgctccatcccggtcaccatgcacgctcctgccagctggcctgagtcatcacagcttggagtccccccaaccccacccaagtaacacactttgtcaaaggtcgcagtcaagggactgcataggcccttggggcagtggcctcaccaggccacactctgccctttctttctgggcccctgggccccgcattgccttctgtcagggctggtggccactgctccacctcctcccccggagctgtgcatggcagttccctccgtgggagccactctcccggggtttcttcctctatgaagaaaccttggcctctatgaagtcaggccccagttgtgacacctcacttgacacccagaagtcttggcctctgctctccaagctcatttgccaacagcagtatctccatttcatgcccaggggtgacactgaccccatgattatagagatggaggatgctgtgtgagaactgggctgagccatgccagtggcctgtgaccctccagccctggatgccaccccccacctgcccaaggggacccccactgatgtggtctctgctgacacctgtgcctgtgcctggggtccctgtcatccttccctggtctgagtggcaagtctcctgccatccctgtccccgctatgcggtgagctcttcagcttgggcccgcctggtggctcacgctactctccaccgtgcctggattagggcgagtgctgaggctggagctgaccctgccctggccttcagggtcttggcttagttccacctgcactggtccaagtccagcctggttgcctagtgaaggatccacagtgggtacataaagggccaagcgctgtccacgtggacacatcctatgtgggcgtgagtgctccctgcaatccccagacaagcctgcctctcagcggggctcagctcagagacatagaccctggagggctgagtctgcctgtgtgcgtgtgtgtgtgcatgtgtgtgtgtgtgagagagagacagggatggggggagagtgtgtgtatcaatgagagagacggagaaagtcgtgtgtgaaagggattgaatatttcagaaaatgaatgagagagattgggagagatggtgggaggtggagtgggagagagacctgttgtttaagagggagactgagtgactccgagaatgagggggaaagatacggagacaggataagctgcagagagagagggagagagggattgaactggagcgagaccaacagagccctgacgctgggatttgggaggatttggtgggttctcagtgaccccactgaggcctgacccaccagtggaaaaggctcacctcctgtaagtgaccacactgtggggtgtaattgtgtgtttgtttgtgtgtgtgtgtgtgtgtctgtgtgtgtgttggcgtcgccctgatggcctcttggagggtcctggggtgggtgggtcttgggcatggggtgccctctgccctcattctttcttcatccgggctccctgcccctgttggggtgggaagcacagatgtcagcttgctgagctgcaggtaccatgacaatcccaagtggaactgctcttggggggctgtgtggggaggggccactgggcaggatttatgagacctgggcagaggtgtggggagcagtgtgggccagagggtgactgggggttggggtgagttgggtagggtgcagctgtgctcatccctcccacccagccccaccctgaggctggtctctagctcgtgagcagaggccgagagaaggcccttccccatcacggggtcctgtctcgtccggtctggcagccctcatctggccaggaggccagcaaggacttccggtgccacactcgggaggggtgagggctttgctggctgcagggttaggagtaggcgcagcctgtggggcccaggagaaccttggggtggggatcaagaacaggtctgggagaggggggagcatcagggccacctgcagcctccacccagcccagctctggaggctttgcccccaccccgcccccatggtaggcgtgttccctagaggctggtggggacctgggagaggggcatgtgcacacatttcatggggatgatgggggactctgggagccagcctgggtgggggctcagaggtgggaggggccctgaggcctgaggtggtggaaggagctcacctatctcaggcccaggcccttgccaggttcctagtccctggccggataccccagggtggcctgggatcctggagagtgctcaggaaactcaggaggagtgtggacgcggctcctctccttccacccacttccctggccctgagggcattgctgggccaccatcccagacctggggcatgtgtcacagggctgccaggagggcatagggcccaaggattccccagggatgccagcccccctgtgggccctcaggactggtagccctgggccccctggcgctttgtagggaggtgctcagcagtgatggttgtgtgcctgtcacacccacccacctgtgcctccccccacctgccacgcccattgtcctacacccagcgcacactcctctccacgctgcgcacgtgaacccgcccgggtcacacacctgccctgccatggtgacaggactgtgtgggatctctgcctccctgcctgaagttcctgccattgggacctgtcacaggcacacaggacacagctggctcaccctcttctctgacagcacctgggccatccctgatagtgatcagccctgctgaggaagggttagggtgggctgcaggctggaggccagggagaggccctggaccgggcctggcatttactcaccctcctcccatcccacactgtcccggagcctccatctccacctgagccagctgggttgatgcggatttccaggcatcctcagcgggacccatggcctggggtcaccaccttcctgagctgcgtggatctcagccaggacttctcgtccctgagaacagattggggctgggagtcccagcccgtccctggaccagccctgccatcagcttgcccagcctagttccctttctcttctgcgctctgaatgtgcactccgcgtgttcagatgctcatggtttctgatgagaagttggctgtgtctctcacggagcctctctcggaggtgatgagtgacttttctcttgctgccgtcaagattcctggctgtggattggatggatgggaagctctgtccctgaacagcccttgtgactatggggctgtccttccacagtgtgcactgagggtgcaggccaaaccttttaaagaataaacagaaagaaatcggctctttcacttcttgcaagttggtgaaaacagactcttccagggaattttaactttttatcatcctatttactctggaaagccttgtctcgtgttttagagcttgtagggtttaataaaactagttaacagccaggcacggtggttcacgcctgtaatcccagcactttgggaggccgtggcggataggtcacttgaggtcaggagttcgagacaatcctggccaacatggcgaaaccccgtctctactaaaattacaaaaactagccaggtgtggtggtgggcacctgtagtcccagctactggggaggaggctgaggcacgagaatcgcttgaactggggagactgaggttgcagtgagccgagttcacaccactgcactccagcctgggtgacagagctagacgctatctcaaaaataaataaataaataaataaataaataaataaatgaatataaataaaactggttaaaaattgagtctccctgaagtaggtgctctttcccgtgaaaactacttttttggtttggtttgaaggtaagaaagagcgggagaaactttgctcttttcatttaataattgtgttcagcctggccgggcgcggtggctcacgcctgtaatcccagcactttgggaggccgaggtgggcggatcacctgaggtcgggagtttgagaccaacctgaccaatatggagaaaccctgtctctactaaaaatacaaaatttttagccgggcatggtggcgcatgcctgtaatcccagctactcgggaggctgaggcagaagaagcgcttgaacccgggaggcggaggttgcagtcagccgagatcgtgccattgcactccagcctgggcaacaagagtgaactccgtctcaaaaaaaaaaaaaaaaaaaaaaattgtattcggcctatgatgaaatattttattattagatagcagtgtcactaataagttttaagttgtccagagttaattgtgaatatcagaacaggattcttataacaaaagcagttgtcttaagatgaatggctcatatttgggtgcagtatttgatgcccaaaagaacaaacataaaccaaaaaaaaaaaaaaaaaaattccagactgtcccctttggatgccagttgaatctgtgtcttgtgccccctgagggtctgcccggtcacatccccttgtcttctctagggttcacggggatccttctcatcctcttctaggtaccaggttccattagttttgtctgtcagtcttgtcaccagggagctggagacctggaggggagccctgatgtctgggacagtgcttgtcagtggatgggcttttgcatagggggatggggtagggagtgagtcattgcattatagacttggactaggtggatgctatttttcatggtggtggtgatgggagaagctgttgggttatttcacagaggaagcccgagctccctgctgaagatgataaatgatgcacagatttcaatccatcctacggcttcagcctccagtcctggtcccacacatctcctggagcagagcctgattcccagcctctgtagctggttgaggagcaaataggtttccctgtcctgactccaccttggagcaccttcccttgagacccaccaggctctctttcagtcacagcatcttcctcctgctccatgtggttgaaatctcaggtcctctaaggatccctcctcattctctgttagtgtgaggtgggacttttttttttgttttgagatggagtcttgctctgtcgcccaggctggagttcagtggcaggatttcagctcagtacagcctcggcctcccgggttcaagtgactctccggcctcagcctcccaagtagctgggattacaggcacctgccatcactcccagctaattttttatatttttagtgaatacagggtttcatcatgttggccaggctggtctctaactcctgaccttaagtgatctacccgcctcagcctcctaaagtgctaggattataggtgtgagccactgcacctggcctgtgaggtgggaagtttcaatactcccttagccttggtttggtcaccagaaggaggggacatgagtgaaggtcccagtccaccctatgcaagcagaagcctctttggttttagttttaaaggtgcattgacccatgtacctttgcatggacatgttcttatttggggttacctttgtgttgactttgtgtggccaggaccctggagatgaggccaggatggccgactccaaccccttagctgcttccttgccctgtatggagcagctcagcctgggatgcaggagcagctgtgtccctccgctcccgccaggcctctccccctgccttctgggactggaagttcctaggagtccggaagtgctgagctgcaggaggcttctcatggccccaggacacacccatcaccccatctatattgagatgttatctagagagacgcctgtagtaaaatccgctctgtgacggtggtgtataaacattttctgtgcaaggaccttgccctccttttcaaaaaagtaagtatgactcccacatgaaaattttcttctacaacacgacatacgttcattgtggtacatttaggaaatttaaatgatttatttcttataaaacatcatctgtttttctactggacctggcttttataaatcatgcggtgataaataatatggcagttagagctgggtgcacttggctcctgcctgtggtcccagctggctgggaggcagaggcaggaggattgcttgaggccaggattccaggctgcagggagctatgactgccagtgcactccagccagggtaacacagcgagaccctgtgttagcctgttttcacgctgctgataaagacatccccaagactgggaagaaaaagaggtttaattggatttacagttccacatggctggggaggcctcagcctcccacatggctggggaggcctcccaccaaaaggcactttcatggtggcggcaagagaaaaatgacagagatgcaaaagcagaaacccccgataaaaccatcagatcttgtgagacttattcactaccatgagaacagtgtgggggaaactgcccccatgattcagattctctcccactgggtccctcccacaaaatgtgggaattaagggagtacagttcaagatgagatttgggtggagacacagagccaaacgatatcattctgcccctggccccttcaaatctcatgtcctcacatttcaaaaccaatcatgacttcccaacagtcccccaaattcttaactcatttcagcattaacccaaatccagagtccaaagtctaatctgagacaaggcaaggcccttccacctatgagcctgtaaaatcaaaagcaagttagttacttcctagatacaatgggggtacaggtattgggtgaatacggccattccaaatgggagaaattggccaaaacaaaggggttacaggacccatgcaagtccaaaatccagcggggcagtcaaattttgaagctccaaagtgatttcctttgactccatgtctcatatccaagtcacagtgatgcaagaggtgtgttcccatagtcgtaggcagctccacccctgtggctttgcagggcatagctcccctgctggcttctttcatgggctggcattgagtgtctgcggcttttccaggcaccttgtacaagctgtcagtgtatctaccattctgatgtttggaggatggtggccttcttcttacagctctactaggcagtaccccagtagggatactgtgtttgggctctgaccccacatttcccttctgcactgccctagcagaggttctccaagagggcccctcccctgcagcaaacttttgcctgggcatccaggcattttcatacatcttctgaaatctagatggaggttcccaaacctcaattcttgacttctgtacacccgcaggctcaacaccacatggtagctgccaaggttggggtttgcactctctgaaaccatgggctgagctgtaccttggccccttttagcaatggctggagtggctgggacacaaggcagcaagtcctaggctgcacacaacatggggactttgggtccagcccacaaaaccattttttgctcctaggcttctgggtctgtgatgggaagaccaatgacatgccctggagacattttccccattgtcttggggttaaacattcccctccttgttacttatgcaaatttctgcagccagcttgaatttcttctaaaaaaatgggtgtttctttactgcatcgtcaggctgcaaattttccaattttttatgctctgtttcccttttaaaatggaatgtttttaaacccaagtcacctcttgaacgcttttctgcttagaaatttcttctgccagataccctaaattatctctctcaagttcaaagttccacaaatctctagggcaggggcaaaatgccgccaatctctttgcttaaacataacaagaatcacctttgctccagttcccaacaagttcctcatctccatctgagaccacatcagcctggaccttagtattcatatcactatcagcatttttatcaaatattaaacaaatttctaggaggttccaaactttcccacattttcctatattcttctgagccctccaaactgttccaacctctgcctgttacccagttccaaagttgcttccacattttcgggtatgttttcagcaacaccccactcccagtaccaatttactgtattagtttgttttcatgctgctgataaagacatacctgtgactgggaagaaaaagaggtttaatgggacttgtagctccacatggctgggaggcctcagaatcatggcctgaggcaaaagttatgtggtagcggcaagagaaaatgaagggtgcaaaagcggaaaccctcgataaaaccatgagatctcgtgagacatattcactaccatgagaacaatatgggggaaactgcccccatgattcaaaatatttcccattgggtccctcccacaacacgtgagaattatgggagtacaattcaagatgagatttcggtggggacacagagccaaaccgtatcagaccccgtctctacaaaaacaaaaacaaaataaaaaaaagtagctacgtgtttgggcctggctttcattatttaccaaggatcaagacctgaacatgaaaatggcaggccaagggttcctgcctttggatgcacatggccaccttgcccactagaacatctgtgccaagcagtgttcccatcaatcataggaaaataccatttcccgcatccttaccaaccctaggtattgccaataagaaaacaaagtctgtatcaatttgatgaaaataatttgaatgtgtgcatttgatgagctgtgagaatgagaatcttttgcatgcattggccatgggcttcccttttgtgagttgcctgtgaatgtccttttcccagtttactagtttgggattgaatattcttacacatttatttggtgaagaacttttatttcaaattatgaaagaaaaaaatacttgctagaattctgatttgaagtgctttcaaattctgtgttaatttggagctgacaccctttaatattgagtcctggctttgagggtctggtgcgtttcctccattcactgaagttttattttacatctctcagtaaagctttatggattagggtcttcagaagccttacttgtttttctggctctattttcttgtccagaaactccaccactgtgctaaagagacagtggtggaggtgctgggcgtgctgcttttctcctggctctaatgggaaggccaagaggcaggtcagggtcagactccaccttgagtctggcattggctgttggcatcatgaggaccccacgtattgtactttgataaagttaataaatggaattctcctttacctcaagaatgccttatgtgttgtgtgtagcatgcaccttcttgtggaaacagcttcacatgtgagagccctagcacgcaggtgatttcaggaccacccccagcccatcccgtggcgcaggatccaggcagctgcagtgcaggcgaggacccctggctgggcgcggtcctgtgcgggtccctgtgcggtgcaggcgtccatgcactctgagactctcagcctgctctgtggcctgtcacgttgtgtgtggggcaagacgcttgggtgcacatatgtgagaatgggactgtgtgtgtgagtggaatgcgctgttgggagcgtgtggggtgtgtgtgtgtggcacctgcggttggggtgtgtgactgtgtagggtggggatctgtgattatatgaatatgagggtgtgattgttgctgggactgggcacgtggctgcctctgtctctgcctctgtgtctgatagagacaggaagagatgggggaggcctggtgtgggggccctgcgggacagggccaggggacccttcctcactttacgccatctgaggaccctccccaaggggaaaagccagctacagtggaaaagcactggcagagtgggcttcgtcctggggagagaggctgggagactgcagctgaaagatgtgggctccaggagggcctcagggggctgagcatcagggtcagggaatagagggcctgggagcagagggcggccctccctccatcttccttccttctctggacttcagagcactgtgtccccttcccacttgcacagctgcaggtggagccagctggggggctttctagagggagtggggtcctctgagggccaagagggccaggtccctgaggacctgaggcccctctgggcctcccagggctgggcctgtggctctgatctgctttgtcctgggagggacatgctcagtggtggggtttgtgtagctgtcactcactcacctgcctgtgcccagccactcacctctcactcccatcagccccacccaatacacacgtggttcctcaactaccatgaggggaagttcctgcctgtgtcacacacatccatcccacccaccacactgcaggttacaggactgccccacaagtgccaccatgcccgcatgaggttacctggcacacaggtatcctcacctgcatgacatgaccagatcgtgcactttctatgccagggccagggccagggcaagcttgcaccttcagccttggggacactgggggtggtggtggctggaggccagggaagtcaccaggctggagacatcatctacctccaggagagggttgatatcagacatctcccgtgcaccactttaagccacctcagcctcacctgggaatctggctgcaggtgagtcccagcagtggaccagcatgggaccagcagttccatgaagctttagaccatctctaggcttaggaaggggctcccttgtcatcacttggtccgggctgcacgtcttgtgaccaagggctctggacggcagatgcagccagccagagcgtggggctgaggggcctgggcacaggagggatgtgagggcttccctgcacccccatggccaccatttcagagggaggacagcaattgtttgggtttgtcctgtgagtggtggcagagagcagggccctgggcaggtccagggccagacaggaatcctgtgctgcagcctcggggccacaagggcacagcatggggccggtgtgggggtgttccctgtgccaaacacattggcaggaggtgccctggggtcagtgggtatgtcagagctgtcaggcctctgagcccaagctaagccatcatatcccctgtgacctgcatgtatacatccagatggcctgaagtaactgaagaatcacaaaagaagtgaaaatggcttgttcctgccttaactgatggcattaccttgtgaaatttcttctcctggctcatcctggctcaaaagctcccccactgagcaccttgtgacccccacccctgccagccagaggacaacctcctttgactgtaattttccactacctacccaagtcctataaaacagccccacccctatctcccttcgctgactctgttttcggactcagcccgcctgcacccaggtgaaataaacagccttgttgctcacacaaagcctgtttggtggtctcttcacacgtacgcgcgtgaaatttggtgccgtgacttggatggggggacctcccttgggagatcaatcccctgtcctcctgctctttgctccatgagaaaaagatccacgtacaatctctggtcctcagaccaaccagcccaaggaacatctcaccaattttaaattgggtaggtggcctctctttactctcttctccaacttctctcactatccctccacctctttctcctttcagtcttggcgccacacttcaatctctcccttctcttaatttcagttccttttctgatagagacagagaagacgcgtattatccgtgagcccaaaactctggtgccagtcaaggactcgggaaaacagccttcccttggtgtttaatcactgtgaggacacctgcttgattattcacccacgtttcagaggtgtctgatcactgcggggacgcctgccttgatccttcacccttagtggcaagcaccactttttggggggcaagcaaccccccaccccttctctccgtgtctctaccctctcttttctctccactttcttgtggggaaacactccccactccttcttcactttcctctgggtggcaagcatcccccaccccttctctccctgtctctaccctctcttttctctccactttccagggggacaagcacccccctccccttctctccgtgtctctaccctctcttttctctggacttgcctccttccctataggcaaacttccaccctccattcctccttcttcttccttagcctgtgttctcaagaacttaaaacctcttcaactcacacctgacctaaagcctaaatgccttattttcttctgcaatgccacttaacctcaatacaaacttgacaatggttccaaatagccagaaaatggcactttcgagttctccatcctacaagatctagataattcttgtcataatatgggcaaatggtctgaggtgcttgatgtccaggcattcttttacacactggtccctccctagtctctgttcccaatgcaactcatcccaaatcttccttcttcccccccccccccccgcctgtcccctcagtcccaaccgcaagtgttgctgcgtctttccaatcgttcttctttacagacccatctgacatctcccctcctccccaggctgctcctcgccaggccaagccaggtcccaattcttcctcagcctctgctcccccaccctataatcctttcatcacctcccttcttcacacctggtccggcttacagtttcattccacgactagcccttccccacctgcccaacaatttcgtcttaaagaggtagctggagctaaaggcatagtcaaggttaacgctcctttttctttatccgacctctcccaaatcagttagcgtttaggctctttttcctcaaatataaaaacccagcccagttcatggcttgtctggcagcaaccctgagacactttacagccctagatcctaaaaggtcaaaaagctgtcttattctcaatatacattttattacctaatctgctcccaacattaaataaaactccaaaaattaaactccagccctcaaaccccacaacaggacttaattaaccccaccttcaagatgtacagtaatagactagaggcagccaagtagcaacatatttctgagttgcaattccttgcctccactgtgagagaaaccccaggcacatctccagcacacaagaactccaaacacctgaaccacagtggccaggcgttccttcaggactgcctgccccaggagcttgcttcaagtgctggaaatctggccactaggccaaggaatgcctgcagcctgggattcctcctaagccatgtcccatctgtgtgggaccccactggaaatcggactgtccaacccggcagccactctcagagcccctggaactctggcccaaggctctctgacggactccttcccagatcttctcggcttagtggctgaagactgatgcagcctgatcaccttggaagccccctggacgccgagcttctggtgactctcacagtggagggtaagtccgtccccttcttaatcaatacagaggctaccccctccacattaccttcttttcaagggcctgtttcctttgcctccataactgttgtgggtattgacagccaggattctagaccccttaaatctcccccactctggtgccaacttggacaatactcttttatgcacttctttttagttatccccacctgcctagttcccttattaggtctaggcattttaactaaatcatctgcttccctgactattcctaggctacagccacacctcattgctgcccttttccccagttcaaagcctccttcacatcttccccttgtatctccgcaccttaatccacaagtataggacacctctactgcctccttggtgactgatcatgcaccccttaccatcccattaaaacctaatcacccttaccccactcaatgccaatatcccatcccacagcatgctttgaaaggattaaacctgttatcactcacctgctacagcatagccttttaaagcttataaactctccttacaattcccccattttacctgtccaaaaactggaaaagccttacaggttagttcaggatctgcaccttattaaccaaattgtcttgcctatccaccccatggtgccaaagccatatactcttctattctcaatacctccctccccaacccctccataacccattattctgttccggatctcaaacacgctttctttactattcctttgcacacttcatcccagcctctctttgctttcacttggactgaccctgacaaccatcagcctcagcaaattacctgggctgtactactgcaagccttcacagacagcccccattacttcagtcaagcccaaatttcatcctcatctgtaacctatctcagcataattctcataaaaacacacatgctctccctgctgatcatgtctggctaatctcccaaaccccaatcccttctacaaaacaacaactcctttccttcctaggcatggttaggtacttccgcctttggatacctagttttgccatcctcacaaaagcaaacctagctgaccccacagatcctaacacctctcagcaagccagactcattgccttaactcaggccctcactcttgcaaagagactttgcatcagtatttatactgactgtcaatatgccttccatatcctgcaccaccatgctcctgctgcagttaactagcccaacctattcctttaattcagcccatccctttgtttcccataaaggatacttttagttaatttaatatctatagaaacaatgctaatgactcatttgctgttaatcaatacgtgggtaaatctctgtttggggctctcagctctgaaggctgtgagacccctgatttcccacgtcacacctctgtatttctgtgcgtgtgtctttaactcctctagcaccactgggttagggtctccccgactgagctggtctcggcattgttcctagagtgtctttgctggttttggtcctctgcattcccatataagtttagaaacaactttttgatttcaacttggagagaattgaagttttgatagtattgagtattcctctccataacgctggtacatggtgccatttattttggtcttccctattttctctctataactttttacatatatatttctatggtgctcttatacatgtagtaattgatttattccaaggcatcttttatttttaatgccattgtaaatgttacattctttaaagtgtaagtttataaatgtttgtgctgccatatagaaggttttaattattttatattgttttgtatttaacattcaaaaactctttagtctctgtagattctctaagactatttatataaatatatctaatgcatatttgtttcttcctcttcaatcttcatatattttactggtcttgctttattgcatttgtagaatctctagcacaatgttggatagcaatggtgaaggaaggcatttttattctaaactcaagaggaactttttttgtttttgctcttgatagcattgtgttttatataaatttttaaatttcacataattttaggcttataagaaagctgtgcaacattttataagtatttctggatacccttcatccagattcaaaaggatagcttttgatatttcaccattaaatagaaagtttaatataagatttttttgttagatgctctttattagattaaagatatattattctaggccaggcatggtgactcacgcctgtaatcccagcacttggggaggccaaggcgggcggatcacgaggtcaggagatcgagaccatcctggctaacacggtgaaaccccgtctctactaaaaatacaaaaaattagccgggcatggtggcaggtgcctgaagtcccagctactcgggaggctgaggcaggagaatggtgtgaactcaagaggtggagcttgcagtgagccgagattgcgccactgctctccagcctgggtgacagagcaagactgagtctcaaaaaaaaaaaaaaaagaaaaaaagatatattattctatttctatttttaagagaattaaattttttttttttttttttttttgagacagggtctggctttgtcacctgggctggagtgcagtggtgcagtcttggctcactgcagcctcaacctccagcacttaagtgatcctcccaccttagcctcctgagtagccgggactacaggtgggcaccaccacacctagctaattttagtaatttttgtagaggcagggtttctccatgttgcccaatgtagtctcaaacttctggctcaagctatctgcccacccagcctcccaaagtgctgggactgtaggtgtgagccactgacccctgtgtaaaataattttttaaatccagaaaagatgaattttataacacatctcacttgcatttagtgaaatgtccatgcaatttttttcccttagttctgtgaatgtgttaaattacatcaaataattttgtaatttgaaacctaccttgcgtttctggtgtaaattctccttaatcagcttatagtattctttatatgtaatttcattcactttgccaatatcttgcatggaacattttgtctgtgtcttcgagtggttggattttggtgtcaggatactagctcattatgaattgggggatgtagaggtgatttctatttattccaacagagctagtcttcttcttttcatagcctgctttgtaccctacgacctggcattttctggatgacatcattgggctatgttgacctttggttttctgtgggttgacacattggagatagggcaggacatgggagggaagacaagagtgagatggggggattcactcccagctgcccttctttggggctacaagttggccatggctgtgttcctctcctgtggccaaaggtcctgtgagctcaccctcccacaagtacaagtctcactggatcatagcaacagctcctttccttgcctcccattagatatttcgctcttgcttgccttgggcattttgttattggtttcccttaactttcctcacagcagagccataagcctgtgaacccaaaagtatctgagacaggtctcaatcaatttagaaagtttattttgccaaggctagggatgtgtctatgacacagcttcaggaggtcctgaggacacgtgcacaaggtggtcagagtacagcttgcttttatacattttagggagatataatacatcaatcaatgcatgtaagatttacattgctttgatctggaagagcagaatgacttgaagtggggttgggggggcttccagttcttaggtgggtttaaaatttttctgattggcagtgggttcaaagagtgattgtcaatagaaaagaatgtctgggttgtgataagggatggtggagaccaaggttttatcatgcagatgaagtgtccaggtagcaggcttcagaaataatagattgtaaatgtttcttatcagacttaaggtctgtgttgatgttaaatcctggttggtttttcctgaattccaaaagggagatgggtataatgaggcaggtttgacccctccttccattatgacctgaactagttttttaggttagctttggaatgcccttggccaagaggaggggtccgttcagatggttaggggccttagaattttattttttgtttatagccattcattaaactcttgtcacgtatcctgtgtgagtgtgccgtttccttcctgcagggacactgactgatatagggaatgcaccctgatagtttatgctttggaagaatttgtataagattggagtggtgtaagtgcctgacaggttcttcctgcctgctgcacaagcaaatcaattcatggagaccatggcattgcagtgaagaaagagtttaattgatgcgaggctggtcaaaccacaccagtgacagagttatcatcaaggcaatctcatcgaaggctcagaggccaggtgtttttcaaatatgcttggtgggcagggagctcgggtatgaggagtgctgagtggttgggttggagatgaaatcataggaagtgaagctgtctttttgcatggagttacttctggaggccacaggaacaactggtgggtccaggagaagccattggtgttagacattaaaaaaaaaaaacacctaaaaaggcatctcaaaaggccaatcacaggttctaccatagtgatggtatctgcaggagtaattggggaagttgcatatctgtgaattccagaataattgctggcaattatttaatatattacatttaatttttttattttaacagctttgttaaagtataattgacatataacaagtatgtatatctaaagtatataatttgtaacttttgtttatgtctgtatcttggccaaattaaggctcctctatcctcctagcctgatggtctctcattagctttacaaagacagttgagttttggggaagggctattatgatttaaagtatgaactaaatgtttcttttcaatgttcctcttttcactaatctattaagtcaattctaattatattttaaaatcttgtatatgttcattaaattaaatttttttgtcataatactttcattgaattataagtgacatataacaagcgtgtatatctaaagtatataatttgtaacttttgacagtggtaaaaaccagaacaaccaccataatgatcaaaataatgaacacatccctcacctccaaatgttttgttgtgcctgtgtgtaacaccctctcttgtatctccttaaccccttcctcctctctctttctcctttttttttttttttttttttttttggagacagagtcttgctctgtcacctaggctggagtgccatagcacagtcttggctcactgcaacttctgcctcccgggttatgaaattctcctgcctcagcctcccgagtagctgggattataggcgtgtgccaccatgcgagactaatttttgtatttttagtagagatggggtttcaccatgttggccaggccggtctcaaactcctgaccacagatgatccacctgccttggcctcccaaagtgctgggattacaggcatgagccaccgtgcccagccaaccccttcctcctctctaggcaactgctgatcaggtttatgtcagtatagattagtttgctttatgtaaattcaatcatacagtatgaaatgttattgtttcctcaaagagaagtcttttaggttaatctgtgtcatgtgtatgaatactttatatcttttttgagtgttaaattttaaaaaattacatatggcaaaactcagtatttatgatgtacatttccatgagttttgacagctatgtcttatgtacgttttgtattggtgtctagaatctcaaacactaccatcacaatagagatgctattttcttactttcaaacatttcttgtgttgtgcttttgtagtgaaatattctcttcgcccttaatctaattctgagtggccactggtttgttctttattccaataactttgccttttctagaactgcttatcaatgcaataatacaataagtagctttttgtgtctggcttctttcaataattttatcatttacacattctaactaggatcttacatttttaaaggtatcatgtatccttatgaatattcattttttcagatgttttaattactggaaataagattactcatcttatttcttaaaaatctggatcttatgcgccaatatatttaatatacatttttgtttagttactagatgagatttgtttttcccctccagctttattggtataattgacaaataggaattgtgtatatataaaatgcacaagtagatactttgatatacattcacattgtgaaataatcatcatactcaagctaatgaacatatgcatcatagatttaatatcatatttagtatcttaaaattaaagaagtattgaaggaagccagactcggaaggctacatattgcatgatttcatttataggcagttccagaaaaggcaaagcttttaaaagatttttgaagtttcatttactcatggtcaactggggtctgaaaacagatgaggcagtacaacaagatatataagatatatgagagagagagagagaaagaaagagagataaaccacattcacacaacttttattacagcatattggtataaatttttattttattattagcctttgttgctaatctcttcttgtgtttaatttagaaattaaactttatcatatgtatggatgtatcaaaaaaacagcacgttgtgtataaggtttggtactatgaatggtttaaggtactcattgggggtcttggaatgtatcccttgcagataatggggggctactctacactatagagtattatgaatcatggtcatcatactgtccattaaatctccagagttcattcatcttgcatagctgaaactttgtacccttgaccagtaacttctcaatcctctctcctgcttcttctgggctccctggaaaccaccattctgctctctgattctacgagtttgagtattttacataccacatagaagtcagatcatataggatttttgtcatgagtcatgagtatgtgggtctggtgcacaggtggtaaaaagaatttactaagacagttgtaggtaaagaaaggcagatttattagaaaatgtataaaactatgttgcaagaaagcaatgggcaagtcagcaagagaggtgctgactgccaggagataaaggcttgctggggattttataggatggtgcttgtactgtgtgctggagagggctatgtgcagtactctattgccaaggttgcagtgatctaacgtgcattttcctatcaatcagccgagggtctcatgataattcaggtgcaggaggattttgaattatttgtgcaggagggctatatgttccggaccgtaaggaagggcagactgataatttatctgctttctctttttgctttcccctgctcccaccagcctcactcattttctctaattagtgccccattgatttgtctttccgtgtctcccttatttttcttagcatagtgtcctccagattcatccattttattgtaaatggtagggtttccttctttttttaaaaactgaacagtagtccattatatcttttgtagaacggaaaaatgtatatatcacattttcttcatccattcatccattaacagaaagtttgattgtttccatatcttggtgattgtgaataatgctacaatgaacaggggagtgcagatgcctgtttgagatactgattttatttccattgattgtatattcaaatgtgggattgctgggtcatatggtaattccaactctatgctgcttttcatagaggctgcacaattttacgtttccaacaacagtgcacaaggttctcaatttcttcacatcatcatgaacgcttgttattttttgtctttttgatagtagctatgataatgggtgtgagatgatagatagctcatggttttggtttgcattttttctgatgatcagtgatgttgaacaccttttcaagcatctattggccattcgtatgtccttttaggaaaaatatctatgcatgtcctttgtccattttcaattggattgtttatttatttttttgctattgagtgtatgaattaattacatattttggatattaacttcttattaaatacatggttctcaaatactttctctggtctgtaggttgatgtctccagctttgtcttcttggtcaggattggtttgtctattttggctttttttgtgattccataaacactttagaattgttttttcctatttctgtagaaaatgccattgggattttcctagggattggcttgaatctgtagattctttggtagtgtggatactttaacattattaattattcaaatctgtgaacataagagttctttccatttctctgtgtcttctttaattttcttcatcaatgttttatggttttcagtgtacaagtcttttacttctttggcttagtttatcctaataattttattctttttgttgttattgcaaatgtaattgttgccatattttccttattggatagttctttgttagtatacagacatacctccgatttttgtaggtttattttgtattttgcaacattactgaatttattagtttataattattatttattagtttattattttagttattatttattagtttattttagttatttattattagttattatttattagttattatttgttagtttattattagtaattattactaataatatataactattatataatatataatataactattataatattataactatatataatatatagctattatatatataactataatatataactattataaataaataataacgaatagtaattagttattattagtttattattagcaattataattattagtttattagtttataattttatgtgtgcatattaagtctttagggttttctacgtataacatcatgtaatcgtctttttttttttttttttttttgagacaggatcttgctctgtcgctcagggtagagtgcagtggcgtgatcttggtcagcttcccaagtagctggaattacaggtgtgcacaatctcacctggataatttttgtatttttagtggagacaggtctaaccatgttggccaggctggtctcaaactcctgacctccagtgattcacctgccttggcctccaaagtgctggcattacaggcttgagccaccacgcctggtcaacatcatgtgatcttgtaagagatactgttttacttcacttttttctgatttagatgccttttcttttcttgccgcattactcttggtaggacttacagttccatgttaaatacaagtggtaagagtgggcattcttatcttgttcctgatcttagaagaaagaattttagtttctcttgattgattatgatggtagcagtgggctttttatatatgaccatatttgtgttgaggtaagttccttcaatacctattttggtggtggttttaatatgaatggacgttgggtaatgtcaggtatttttctgcatcttttaaaatgatcctgtggtttttattcttcattctgttaatatggtgtgccatgttgatggatttgcatattttgaaacatctttcatttcagggataaattctacttggtcatattgtgtaattctgttcatgtgtttgaacttggttttctactatgttattgaagatttaaaaaatctatgttcattgtgaatattagattgtagctttttttcttttcttcttttgcttttatcattttagatggacacaataataattgtatatatttatggggtacagtatgatatttcaatacatgtatacaatgtgtaatgatcaaagcagcctgattagcatatacacctcaaacattgatcattactttgcattgggaacatgcagtatctgctcttctaggtatttgaaaatatacagtaagccaggtgcagtggctcatgcctgtaatcccagcactttgggaggctgaggtgggaggatcacgaggtcaggagatcgagaccatcctggctaacacggtgaaaccctgtctctactaaaaatacaaaaaattagcagggtgtggtggcgggcaactgtaatcccagctactcaggaagctgaggcaggagaatggcatgaacctgggaggcagagcttgcagtgagctgagattgtgccactgcactccagcctgggcgacagagcgagacttcatctcaaaaaaaatatatatatatatacagtaaattgtgtaatacagtcaccctacaatcctatagaacactagaacttattcctcctatctagctgcacttttgtatccatccatcaatctttggctatattcccacctcccccaactctttcttgcctcaagtaacccttagtctacactctccttctatgagagcaactttttaaccttccacatgtgagtgagaacatacagtatttatctttctgtgtcttggcttcttttgcttaacacaatgactccaagctcatttatgttgctgcaaatgacagcattttattctttttcatagctagatcatattccattgtgtatttataccatatgttcttcatttgttcacatgttcatggacacttaggttgattccatgttttgtccattgtgaacagtgttgcaataaacatgagagtgcagatacctctttgatatactgacttccttttgtctggatgtgtacccagtaatgggattgcttgaccatatatggtaaatctatttttagttttttgaggaaccccccatagtgtttttcctcatggctgtaataatttacgttcccacaaacagcatacaagagttctcttttctttgctttctcactagcatttggtatcttttgtctttgtcatagtagccattttaactgggatgagatgatatctgaatgtgattttgatgtgcatatcctgtatgataagtgatgttgagcattttaaaaatattagttggccatatgtatgtcatcttttgagagatgtttattcagctaatttgtccatttctttttcttttttttttttgagatagagtttcactcttgttgcccaggctggagtgcaatggtgcaatcttggctcactgcaacctctgcctcccaggttcaagtgattctcctgcctcagcctcccgagtagctgggattacaggcacgggccaccacgcccagctaattttatatttttagtagaggcatggtttcaccatgttggccaggctggtcttgaactcctgacctcaggtgatccatccacctgagcctcccaaagtgctgggattacaggcatgagccactgcacctggccaagttgtccatttttacatcagattatttgtattttttttgacattgaattgttcaagtttctcatatattgtggatattaatcccttgttgaatgaatagtttgcagttttcttcccattctgcaagttgtctcttgtctctgttgattgttttctttgctgtgcaggagctttttagtttaatgtaatccaattagcctatttttgcttttgtttcctgtgctttcaagttcttcaccacaaaatctttgcccagatcaatgtcttgaagcatttcccctgctttcttcgagtagttccatagtttcagctcttaatttaagtctgtaagctattttgagttgattttattaatatggtgagatataggggtctagtttcatttttcggcatacagatatttaatgttccaggcatcattcattcaagtttttttttctcttgcctaattgctctagctaggacttccagtactatgtcaaataaaagtggtgacaggccaggcacggtggctcatgcctgtaatcccagcactttgggaggccaaggcaggcagatcacgatgttaggtgattgagatcatcctggctaacatggtgaaaccccgtctctactaaaaatacaaaaaattagctgggtgtggtggcacatgcctgtaatcccagctactctggaggctgaggcaggagaatcgcttgaacccgggaggcggaggttgcagtgcgccgagatcgtgccactgcactccagcctgggtgacagagcgagactccatctcaaaaataaataaataaataaataaaagtggtgataatggacgttcttgccttgtttcaaatcaatacatgtaacacatcacatcaacagaatgagtacaagaaccatatgattatctcagtaggtgcagaaaaagcgtgataaaattcaacagccctttatagtaaaaactcttaagaagctgggtatagaaggaatgtagcccagtacaataaatcagtgtatggcaaacccacagccaacatcatagtgaatagggaaaagtacaaagctcttccaggaaatgtaaagaaccaataaatgttcttgctgcctttgttgaaaatcagttggttgtaaatgcttggacgtacttctgagttgtctatttagtttcactggtctgtgtgtctgtttttatgccagtactatgctgttttgtttactctaactttgtagcctatttttaagtcaagtcatgctatgcctccagctttgttctttttgctcaggattgctttggatgctcagagtcgtttgtggtttcatataaatttcaggattattttttatatttctgtgacaatatcattgatattttgatagggattgcattgaatctgcagatcatttttggcaacatggtcattttcacaatagtgatccttccaattatgagcatggaatatcttttcatgttttagtgtcctcttcaattggtttcctcagtattttatagtttttttggtggaggtcttccacctcctttgttatagttattctgaagctttttttttggtagctgttttatacgagattgctctttaatttctttcttttctaatttgttgttgatgttcaggaatggtactggttttagtatgatgattttgtatcctgcacctttaataaattcatcggtcagtttaagagtagtttggtggtgcttttggggttttctgtacataagatgatgtcctctgcaagcagagacaatttgacatcttactttccagtctggatgcccgttatttctttctcttgcctaattgctctggctaggacttccagcactacattgaataaaagtggtagaaatggacattcttggcttgttccagatcttggaggaagagctttgtacttttcgttattcactatgatgttagctgtgtgtttgccatacattgatttcttgtgttgggctgcattccttctatacccagtttgttaagagcttttactatgaagggctgctgaattttatcatgctttttctgcaccaatcaagatgatcatatggttcttgtactcactctgttgatgtggtgcgtcccacttattgatttgtgtatctggaaccatccttgcatcctgggttaaatcccacttggtcatgggaatgatcactttcatgtgctgctgaatttggttggctagtattttgtggaggatgttgacatctacatgtatcagggatatcggcctatagttttctctctctctctctctcttttttttttgctgtgtgctcctctggttttggtatcaggataatgctggtcttgcaaaatgaatttggaagtattccctactcttcaattttctggaagagtttgagaagaattactattattttctcctaaatgttaggtggaattctgcagtaaagccattggcatctaggcttttctttgataggacacattttattacagattcaatttgtttgagataggagggctagatgggactgactgactagttctcctcacagatcacacatgatttggtaaagtagtttcccttgagggcaggcttttgttatatagcacaggatactttgggcttacttcaaaatgcttgtttccttgggtgtgtttcagaatgattattttcacccctcctcctgtctgaagcatgagataatttttctccagtcttcatcatgagaatcttgtgtgtctcctggaggaaaaatctcatgaaagtatgggtgctgaccccattatgagactgggttcccaggttttaagtctcaagcttgtccacccttagcctccggcaatttaattactgttcacctgtccctatcagttgctggttcccaaggcttccactcctcaaaatctgatcctctatatttgctgtctctccagtttggggggcattgctttgccctatgaactcaattctctgaagaatttaagaagggctattgattttcagtttgttcaaccttttgttgttgtgaggatgggagtaacaagctctttacatgctggaatggaaaccagaagtctagatctatattttctatttctcgttatcaagttctctttcccctatacttttgtcaatatctccttttcatgtggaaattttcagaagctttcacaagccaagctggagcttctatcccagggctacataatagagttcagtttgtttatttatttattttttttgtagagacaggatctcccttttttgcccaggctggtcttgaactccagtcctaaggtaatctgccctggcctcccaaagtgctgagattataggcatgagccaccatatgtgaccttttttttgtttttaatgctatcttgatctagttttgaagccctggcaagaggctggtgagttccctttaatgggctctcacattctgggtcactatgcacaagctctaatcaccccagggccaggtaccagacagctagggatgacccctattccctgaaacctgtgaaattgttcaaactcatcaatccacagggagcctgaaacctaactagctccactaaccctgcttgccatacataagcagccctctacagttattccttactgttaccctgtccctgggtgcaaccccctgcatacccttgcctgacagccttctcccctttggagctgtaagtaaccaagcgttctgcttttcatgtgtctgagtgtcagcatgttatatcccaccataaaaagaacctttacatcttgtaaaacaggctgtcctttgacttcaggattttacccttccaagcccctcgagttctgtttctaaccaggtacttcctgggcatctacctccagcttagaggtgtgggttaaggctcccctaagggtttgtacctaaaagtatgaatcagtttccaccatggtgaatctgggcaattttataatagctccaggcatggttcctacagagactggaagactatacagtagtggctggatgcctgcaacagtgtaccctgtaggggagacccacccttcagtatgccatagctatgaccaatactggtttccttatttatgacccaacctgtccctagggcatgaagaggatgcccctttgtttccaagttgccttttactcttggtatgaaatccaaactcctagtgtgtctggaacgattccttaggttccaacccttcccctgccatgatgaatgcttctccaactataccccaaactacctccacccaacagatctccctaaagcctagtccattgagctgccaggcctttgttcagatatcttctctgccaggagcaacctccaaggaatttgcatttcttccaggtttccaggtactgctgatgttgctggtatggagaccacacattttaatgtaataagtgatttattcacttactataaaaatttacatattctctgaacatttcctgtgtttatgtcttggactttatttcattgcttcaattctcccaagctttacaaccaggaaatgggttggtatatttcatattaaactgatttaaataactacaaaattagcaaaccaaggtcagtgacagataattgcagattttcagtcacataaataatgactaattgtcaatgagtaattttgtatagtactattatttttactaaaataaatttttaagggagaagtaaagctgcaaataattaagcaatttgtttatacattgggatccaccaccttccagaaagtcacattcttctcagtgtaagtggtgagcacttacacactttgtcctgtctacctttttcttgacatgttccaatcttgccatgtaatttccattgactttctatactagtgggttctaatagaaataggttgtctcagcttcgagggagattaagcttagcaggtatggtttgaggcactctgaaaattaccctgagaaatacattaacttacatggttggggccctccctcttgccaaactgctattagaataaaagatgaggcatctaatttcccaataaaaagaaaggcagtgtatagggttttttcatttcattttttattgtaataaaatatgcataacataaatgttaccactttattttcaagtgtacaattcaggagcattacgtacgttcacaagcttgtggatccactagcattatctatttccagaacttttcatcatccccaaccaaacctctgtatccaataaacaaaaattctcccttcctctctgcctctagcccctggtaacctgtaatttttgtctctatgaatttgcctattctaggatagaccatattaggccacaaaacaagtcttaataattttattttttaagtacaatttccattttatttttccccagagaatagtctgtcttcagtctttaaggactaagctccttacatgggctttggtgggggtcatggggaagcacccgcaggtctaaatcggggagggggtgttgggtccttgcgggcttcatgagatcgattcctgactactttgctgtgaattgcacaactcacacagtaatgtagtttcacatacagcttgggaagcacataggcattgaaggtgcttgcttcagaaatgtccctgactgccgcggcctccactatgtttcaaatgatgagtttttttctttttttttttgagacggagtttcgctcttgtcacccaggctagagtgcagtggcacaatcttggttcactgcaacctccgtctcccgggttcaagcgattctcctgcctcagcctcccaagtaactgagattacagactcctgccaccacgccaggcgaattttttgtatttttagtaaagatggggttttaccatgttgggcaggctggtctcgaacccctgacctcgtgatctgcccaccttggcctcccaaagtgctgggattacaggcatgagccactgcacctggccccagtgacgagtttcttaacggctttgtacttgggcatgcatcgggcacagttcatgcagcaaataggctgcatgtggccgcggccctttttggcatgattgttgttctttcttttctttgtcatctttgaggcacaatgaccagagagaggtagtcttaataactttaaagattgaaatcatacagtgtatcttctgatcacaatgtaatgaaacactagaaacaaatagcagacagaaaacagtaaaattcacaaatatatggcaactaaatggcacactcaaatcacagataggtcaatgaagaaatcacaaggtaaattaggaaatatcttgagggatattacactacctcatatacttatccttttttgtggtaagaacacttaaaatttactctcagaaatgttcaagaatataatgcattaactgtagtcatcatgttgtgcaatagctctcttttatttctcccatctaactgaggttgtgtatcctttgaccaacttgggaccccttagtccctattaaccatcattttactctctactttcatgagtttgacttttttagattccacatataagtgagattatatggtatttgtctttctgtggtttataatttttttatgcatttgtctttttaagttgtgtcaaaaataaaaacgagttacaaagcaaaattaaattatatatatttacatacatatgtatatatatgtaaatatataaatgaatatatataaatatattcatttatatatttatatatttacatatatatatatatatatatatatatatatatatatatatatatgtatatatatttacaggcgtgaaccactgcacccggccaataatattggtttttatatctgtccatatacttaccagagaactttatttcttcacataggtttgaattactgtctagtgtcttttcatttcaatctgaatgacccttagtatttctcatagggtaagtctactggtaatgaacattcatggcttttgcttatctgataatgtcttcatttttccccacttttgcaggaccattgtgctagacatagtatttttaattaacaggtttttccttatatcactttaaatatatcataccatttccttctggagtgcagggtttctgctgagaaatgacttgatgatcttattgaggatcctttacaggtgatgtgttacttttcttttactgctttcaagattctgtcatttggcatttcactattatgtatctcagtgggtttatcttacttggagttcactaacgtatcgaatctacacattcatgtgtttcctcaaatttgagaagttttcagtcaacatttcttaaagtaattctactaccttctctctctattttcctgggaatcccataatacatatattggtccagtgatggtttcccataagttccttaggttttattcactattcttcattctttttactttctattgctgagatctgatcatttaaaatgtcttatcttcaagttggctgctgaagtctgctgttgaactcctaattttttcatcttgactaatagattaatatatttttcagcttcacaatatctgtttggttcctttctatagtatctatatctttttgttgatattctcattttgttttaaatcatttccctgatatcatttagttctttgtgtttcctttatgtatctgagcccatttaataccgttaatacagttactttaatatctgagcatatttaacacagttgtctttgtccagtaaacccaatgcctgtcttcagagatgatttgtgccactttgtattcatcttttgaatggacaatgttttttctatttctttgattgccttgtgattgtttaagtgaaaattgggcatttgaaaacaacagccacatctctcagtctttgtatactgggtctgtttcaggaaagtcctttaataattagctaggaatgttctgtgccttgggatcagtatgaggaaaaagcttaaggttcttgggtattttctgagcatatctcttggttgggtctgtgtgtgtttttttcaatccctctgtatacacagctgcttttaaatgtcttatttttccaaagagtctccccctgggttgtcttggagacttagatggtgtatacatatctccacctgtattcttttactctatgtgtctacaggtcttagtgtccttgcagctttcccaagtagtatttgatgcttcttgctgtctgagatctgaattaggtgaggtagagaccagtcctgactctgcaagtctacccccaccacttcccattattgatgctacagattagatctttatacattgtgttcccaataacaggctaactatttttatgcatttgtcttttcaatcctgtagaagataaaaaaaaagtggagttacaaaccaaaactataatagtattacattttataattcctcatgtatttacctttactagtgaactttacttttccatatggctttgagtgacagtctggcttcttttaatttcaacctgatagacttccttcagcatttttttttcaggacatgtctagtgataatcaactgcctcagcttttgtttatctgggaatatgtgaatttctccctaatttttcaagagcattttgctgaatataaactctctattgacagctttttttcttcagcactttatgtttattgatcagcttccttctggcttctagggtttctgatgagaccctggttgatagtcttgaggatcccttgtatgacaggagttgcttctcttttgctattttcaagattatctgtctttggcttttgacatttgattatgtgtctcagtatgggtctcttttcaattctcctacctaagagttcattctgcttgctggattgcaaattcatgtctttcatcaaatttggagatttttcagccattatgtcttaaaatagtttctctgcccctttctctcttttccccttcaaggattcccaaattgatgttgtgctacagttccactaagctctgttcactcttctttttcatgttgataatttatatttgtcctatttttaagtttgctgaatctctcctctaattgcttatcttttgaatccctctattgtattcatattttttgtttctgttactgtaattttttatccagattttttgattcttttaaaaaatcatttcatctcattatttctatcctcagtttgctcatacatctttttcctttgttcatatatttctttagcttttaaagcatctttaagacagttgtctttttatagtgagtctgacatctgggctgcctcaagtatgttttctgtcaattcattttgttcctttaattgggccatacttttctgttttttggcatgccttcaggtttttgttgttgttgaatactggacatttgaatcttacaatatgatatctctggaaatcatatttccccccttcccctggatttgctgcacttttgcctttgtttgtattattatgagataactgtgcaccagagatcagcctaaaataaaagctgaagaaggttttttcagtgcttgtatctttccatgagcatgtgaggcggctttctgaattcttctgtatatgtagttgtttttgaattaaaaaaaataggtgcaagtctttaaaatctcctgaaagtcacttcatccagtgggggttgaaacaatgatgactagcctacaagcccacaagcccacaagatcagaagcaccaatccacagtcagaacacagaaccatatggccttgtcattgtcttgtatcttgcatcaattacttctgcatatacagcttttttcctctaacacaattgcaatttgtttaaagactgactccccctcaacagcaaagaattaagcgtccaggaagtgctcagtgatatgtgccttgattctttctagatgtttaccaacaactgagctctaatcacatttgactggcccaaggctaacaaggaaactttgactttccaggcatcggtgatcttcaatgacaggctgtaacctctactcaggaagagtgagggcagtggcacccagtccatgggactctgtactcagagatgatgctgaagacctgtagtcctctggtctccatgggtaaagcctcccctttcctctatgtgaagcctgacagcctccttcagttggccttttttccagctctgtagggcaccgtccttccttctcacagacctgctgaattctcatctcatctcctatctggtctctttgtttcccctcaggttattttgggcgagaaacattccctcaaaatggctcagatactaaaggatttgttgtaaggaaatgggtgcattttgtaagagctccctcaaaaatgtgaaacagtaaatacataagagcgacaagtgattagatgtgacatctgagaccagaatgatgaagcaaccatgagaagacaatgatgatgaaatcaatagctaatacttattgaatgctattaagaggccaggcattgttgtaaacactttgcatcaattaactcatctaattttcataataatgctgtgagatagctttattaccattttatagatggagaaactgaggcatgacatagtgaagtagtttgtccaaggtcacacaaagccagtatacatgcaacttggatttaaacccaggtaacatgactccaaagcttaatgctcttcacacacacaccttggagctattaaagggtatgcattgtttatctattaggtccacagtggatgcttaagaaatggttaataggtatgactgaggaaataatatgatgtcagtgacatcgtaacatcattatgacatcagcccaaccttctatcataacaaagtcatggtctcttattgctcttaaaagcttcatatcttaatttaaaaatatggccttctggctgggtgtggtggctcatgcctgtaatcccagcactttgggaggccgaggcgggcagatcacttgaggtcaggagatcaagattagcctggccaacatggtgaaaccctgtctctactaaaaatacaaaaaattagctgggtgtggtggcacatgcctgtaatcccagttactcaggaggctgaggtaggagaattgcttgaacccgagaggtggaggttgcagtgagctgagattgcaccatttcactccagcttgggcaacaagagtgaaactccatctcaaaaaaaaaaaaaaaaaaaaaaagatggccttctttttcctaattctgttattgtgaaggcactttaattccagaaatgtaaagcattattatgtgtatgctcatgctttttaaatgacaaagcacaggtctttggatgaatcctgtcataacaaagtgacatggtggcataaaactatgtgtagtggaaacaaaaaaaatctgggcattataggactacttcatctttgtggtaccagttccttgggagagctgaagaaggacagagaatgagagaaaagaaagctactgtcattatcccataagtatatatgtggtagccagactatccataattacagcagtttgataccacgtcatgcttccttagttatatttactttggagtcagagtggtgtcctgctgccaggctggaaagcagtggtgtgatgatgcctcactgtgaccttaaactcctgtactcaagcaatccctccccactcagcctcctgaatagctaggactgcaggcatatgcctacacctgggtaattaaaaaatatatatttttagagatcgagtcttgctatgttgcccaggctggtcttgaactcctggcttcaaacaatcctcctgccccagcctcccaaatttctgggattacagatatgttccattgcacctggcccttccttacttataagtctaagatccctcaatgtttcatagaatttcaatataaatttcaggattaaaattaaatcaaatgaaagataaaatccctgcagaatagtaaaaatttaccaccccattccaaacctactgtctctattccaaagtgctattggaatatgcctctatgcttttagctttcagttaaggtagtacatgtatcagaggagatatgttttgttgaaagtcagaaaccttatcactcattccacaccagaattattgtatgtataacataatgttccttttaaaaataacatatcttatgattctcacctgccatagtgaacaaaatctgaagcataatccatatcacagcccttcacttacatcagtgtccatacactccaaatcaaattgatctgcattacctttctaatcacaagataggattctaatcacagggccagtgagaccgttccatttcctttttttttctttttttttttttgagacggagtctcactctgtcgcccaggctggagcgcggtggtgcgatctcggctcactgcaagctccacctccagtgttcatgccattctcctgccttagcctcctgagtagctgggattacaggcatgtgccaccatcctcagctaattttgtatttttagtagaggcggggtttctccatgttggccaggctggtctcgaactcctgacctcaggtgatccacccgcctgggcctcccaaagtgctgggattacaggcatgagccaccacgcctggccccatttcttatctagaacttagaatatttgaagccatcctccctacttacaaaccataactatctgtcaagtttcagtgcagagaacaaaaactctcttaactatttcaagacatatattgcagtaaatcagtgatttcaaaattggtaggtgggctgtaaaagtaatgggaacacttctggactagtgatttcaaggtaaactcctataactatgacccagagatggagaaatgacagttgctgaaaccaatgatgctgccagcggcactacctcaaagccacagaatctgaaactagacatgggaacatggaatccagctgcagcaagtatgacagaacttgactatccactttacctagaataacaccctgtgcaccacatacacacacacacaggcacacacagggatgcacatggctacatgagtagtactcattacataattagtgttcatcatttaagattcatttcaaaaatcacatccagctaagcctgctctgatctcttgtagtatgttgtttcttagttattttctcatagcacttgtaaaggattatttcaaatttatttgctatccatttctcttgtcagataatgtctctgtgagaaaaagaccacatttgttaattattacaatggttatcaaaatgtgctttctggacaaaacagtgttactgtcacctaagaatgtgtgaaaaatgcaaattcaaatcaactcatacagaacctagaactgaggctagcttgaggctaaagcaatctgtgctttaacaagccccctagtgattctgacacaccactaaagctcagaactactggattcctgtatcccattgctgtgtaatacacacgagtgatgctcagtaaattttcttgaaatgtagtaagcccactggaaatggactccgaataatcctcaccaaaataccgctattcttagtaaaaagagcaggtgtttttctttaggtttgcttgtctcccactaaaggctatactgaggctaatcttagtgaaatttttttgccagaaatagtcacagagaaagagtacgtgagatacaaaatgattttattagataccaaaacctttattcacaccattttatttcttttgcagctttaatttttaacattataacatttactggctcctctgggtgactaaatatcttcacatgcccactagctaaaaagaatttctaagtagaactcaactgaaactgcaagctactgctctaagaaatgcataatgacatttatttgctctcctgtagaaccctgtttacaaatagcatcactgcaaagatttacacgtaattcctaaaactttcaggttgttcttccattaatcttctgatgtgtagcaagataaacactcttagtgaacacttggctacatctcttaaatgagagttctctccagtttgagttctttgtaaaataagggatgcacttggaactgaagtcttccctcaatttctaaattttctacattcatacagcttctctcctgtaggagtttgtaaaagattcctattgtctatagtctttcccacatttgctatatgtacagggttttatcctagtgtgagtatacttatgtcaattaaggggttaatactgacaaaggctttcccacatttatggtcttcatatgatttctctacagtataaactctgaaaaataaaaacatctgaatcattgctgaaagtcttcccatattcactacattcataaaacttttccccagtataattttttctgatgttaaatgaggatctatgaatgaactttaccatgataaacactgcttcatatacattctcttctgtaagatttctcacatgtatagtgattcatatagtctaaaggcttttccacacttaccacactattgggtttctctccattatgtactctttgatgggcagtaagatttgagcctttgctaaaagctttcccacactcactacatttatatggcttttctccagtatgaattctctgatgtacggtaaggtttgaactacagctgaaggtcttcccacatttaatacattcgtaaggtttctctccagtatgaattctgtgatgttgaagcagggatgacctatgactaaaggctttcccacatatatggcattcattagatagaaatcacatttcaatctaatgtgatttctcaaatgcatattcagtgattcaagctggttgaaggatttcctgcatttctgacattcaaagggtttttcttcagtatgaatactctgatgctgaacaagaaatgagaggctactaaagactttcagacatttgttgcattcatattgtttctccatagtgtgaattctttgatgtggagtaaggtgtgagctacagcagaaagctttctcacattctctacattcataaggcttctctccagtatggattttctgatggtgaatgagagacgacgtatgaatgaaggcctttccacatatacgacactcatagagtttttcttgcgtatgaattcttagatgttcaataagatgggacacacgcctaaaagactttccacagttcatacattcatatggtttctctccagtgtgagtgctctgatggttagtaagtgatgagccatggctaaaggccttcccacattcaatacatttgtaaggtttctctccactatggcttatctgatgtcgtgtaagggatgagccgtggctaaaagtcttcccacattcacgacattcacagggcttctctcctgtatgaattctccagtggcgattgaggattgactgtttgccaaaggctttcccacattccctagatgtatagactttctctattataagtgtggtgaggagaggtgctctggttaacggctgctccacttttattagaattcaagagtttctttccaccattgagtctctcattttttacaactgacttttttggtaaattcttctttaatatattgtatttgtgtgaattccctttagcagaatttttttatggttcagaaagagtagactttgaatgaaaggtgattctaaatgtgtcatatttgtaactgtccccagtggggctttctctagaggtgagagttgctggtctgaaatgttctacatgaattccaggcttcccttccaacttttctatgtgttccaaattcttggtagaatttgaaaattcataactttgttttaaaactttttctattgttactgtttggagtgaatcttccttataaatatccttctttgttgataattccttgttttcccatcttgattcccaacctgaaatatataaagaaagcaaagtactgtttttttctttttttttactccttgaaaagaaacttctatggtggaattaggagaaatggataagaattgaagcccccagaaaacacagagttctgacaattcaaatatttcagtgatttctgaacaatgctcaaatggagcagagaatacagagttcacagaagaagcaggagtgataacagaaatgggtaaaatatacataatagataaaacagtatatgaataaaaggaaactatcagaaataaaatgtggaaggcattctggattccaagccatctctttgtgcctatattcatgtatgaaagattgcattttgtctcatagcctttttctccaaccttccattaatctcaatttgctgccagattaacatgcttaaaatacagaattgatactactgcattaaacagttgcaggaaaaacaaaataatctaagtgctgtttagagctgacaaagatttaggccttctgaggttatgaagaaactgtgaatcatatcagttattggacattagaaaatattattcctaggaacatattttatatgttccttacttcctctaatatgttcatatttcatctacaaagctcagctttagaaaagtgattttccatctaattgtcagcttttcttagcctaaaagtatcagtttgttttttcttatgtagatttaagaaagaataatttgccttactttgtcatgaatagagtaacaatttgaattattataatgacaaaaacctctaaccttgattagatgacatgagtgatacagataataatgtgggatagaggaacaattattttgaaaatctaagctaaatatccctcaatttttcattaatatttgagatatttgaagatagtgttcctaaaatgcctccacactcactataaacatctttaaccaaatcttcctttgtctcattcaccatgactcacctggaatcataccttttgacagttttttctccaccatccagggctctttcccatgctccaacaatgtgatcacatatggcttagttatggaaagacctgcttacaggaagaatatagaattgtttaagctgtggtcttctattatgagaggccatcaaaagagggaccacaggaatggatgaagggtgttcattgaaatggaaagataagctttaggcagggcacaacagagctgcacatttcctcgggagcatggtacagaattcagccgtttacttaggagaatctccagcaattcagggtggcaaaagaaaggtgtcccctgttggagtggaaggggtgatatccttacctacagagacaaggttctcataattctggaccatcacatccttgtataagtccctctgagcagaatctaggcatgcccactcttcatgagagaagtctatagccacatcactaaatgtcacctgaaatagcaaatatatttaggctcagccatagcccaggcctcttctgtcactgaagaagaggtaaaattagcctggttgtggaagaaatggaacaagattcaggagtcgtgacaaagattgggaatgtgatctcagttaagtaataataggacagttacgtagatggaattattacataataaaggggagagttatgtgtttagaattattatacaataaggatgagagacaaatatgagagctttgcttcagtagagttaactttttgttaaaagttatagaattgtatgaatttttaaaaatcagcatttaacatttgacagcacagagtcaagtatttggttatatattttataccttaagtactaggtaagtaattaaaaaatgaggctaaagcgattctctcttgaatgggataccaggatgatccactaaccctcataaaaaatgggtttggaaaaaagacatctttatattaaagactgatagacatacactgttatggtttgattgtgtctcccataaagcatgtattgaacttaataaccgttctaacagtattgagaggtgagatctttaggagacgattaggccttgagggctctgccgtcatgaatggattaatgtcatcatcgtgggagtgtgttccttatttaaaaaatgagtctgaggcccctttttcctctctcctctttttgcccatccacccatccaccataaaagcacacagcaacacggcccttgtcagacccctcccccttgatcttggacttctcaggctccaaaaccatgagaagtcaatttcttttttttctttcttttttctttttttttttgagatggagtctcactctgttgcccaggctagagtgcaatggcacgatctcggctcactgcaacctctgtctcctgggttcaagtgattctcctgtctcagcctcccaagcagctgggattacaggtgcccgccaccatgcctggctaatttttgtatttttagtagagacggggtttcaccatgttggccatgctggtcttgatctcctgatctcaagtgatccacccacctcagcctcccaaagtgctgggattacaggtgtgagccaccgtgcctggccaagaagtcgatttctattgtttgtaaattactcagtctgtggtattctgttacagcagcacaaatggactaaaacatacacataactgattcataaaaaagaaaaatatatttatggcatatacttaaactttgtactgatagacatttaataactaaaatatgagacccctgggcgaaaagactgaaggctggtttcatgtcatagatcaggggtccctaacccccagaccatggactggtactggtctgtggcctgttaggaactgggccacacagcaggaggtgtgtagtcggcaagtgagcattaccacctgagctccacctcctgtcagatcagccgtggcactgcattctcataggagcgcaatccctactgtgaactgtgcatgcaagggatcgaggctgcacaccccttatgagaatctaactaatgtctgatgatctgaggtggaacagtttcatccccaaacaaacacctcccacttctggggaaaaattgtcttccatgaaactgatccctggtgccaaaaatgttgggcacccctgccacagacagtccttaactaggacctgaaactaagcggggaacaaaagggtacatttcaaagaaaatattctaaggaaatgctcacagatgtgcttggaaattcctctcaatagtactcatttcaaagtattatttaagatagtaaaactttagaagcttaaatattcaataatagcttattgactagtcaaattatatgtgcaaaaatacatccatttaatatagcattattactgtctttgatttgtgaaagactgctctactgtggtaattttttagctctgagagttaattcagcactgtattacattatttggatattttgcgtgcatgttcaccagtgacactggtctctggttttaaaggcagaatttacttttgtcaggtgttgggaaaataattaaaattcaaatctcctgccaatggtagaaaatcctttccacagatgtagaaaagaaagaaaagagttttattactgaataagcattaaataagaccttgatgcatgtcacaggcaatccactaatgagattaaaaggacaggaagaaatctcactcatccttttatatcaccaagcagatacaatccaatacatacattttccaaataaacaataacttatccaagtaagacctgacagttcaatttgctacgcataatttgtcctaaattcacccattaattggagttgacactgttagttaattgcctttatcctaaataaaaataacgtttctcatatctttatgacagacaagtcattacaacttagagccaggaatgcttctttcttcccctgcagttgcccgggcagcttgaaatgttcactcatctctgtccccaaaagaacataggatatttgtcctagcacttatttaaatttcccatgctttcttacttttctacagtgctgcagtcctcaatacagtagccactagccaatttggctacctacatttaaattaattaaaatgtaaaaataaaataaaatttaaaattcagttcctcagttgcttaagccacagttcaagtactcaatagtcatatggggctggtggctaccgtactgaccagtacacatgcacagcacttccaccactgcagaaagttctcttagacaatactgcactagatcatgaagtcctgtgtgtcagtgtacaccacaatccatgtacaacttttcctaccaggtacttcataagtgtttagaagatgaaccaatgaatgtttttggcattagttcactttagcctttactttgttttttttttttaagagatagtatcttgctctgttgctaagctggagtgcagtgacataatcatagcccactgcagcctcacacccctgggctcaagcaatcttcccacctcatcagcctcccgagtagctgggacaacagacatgtaccaccatgccagtttttcaattctaattatctattttttccaagaaaacagacttcacccaacatgtacatctgctactcatatcccctcctatgcaagcttcaccttccatgccatgattctgccccaccagttcttcattactcatcttattcactccacagttacttactaagcatctatttggtgccaggtaccactctgggtactgaagctataatagacaacaaagaagaaaaaagattcctcccaccaggaaaagacaatgagcacgtgcatatagtgaacatacagtacatcagctagtgagtgacacacgccgtggaaaacaagaaagcagtgacggaggagtggaagtgctaggtgttcagggaagcttttctgagaaagtaaccaccagaacccaaaatgtactaaaagattggacttatgtgtccttaatgaatgtgtcaaatgagtctcctggaaggagcatgttattaatatcatgtcatacctgtgctcttagagaaagaaagatggatgcagttcagattttgtctgcagatattgtacatgatgccaaagctaacaaggtaccctctgggtggcctgggaaaggtatgttgcatgccttcagaggtggagataaattgcagtagagaggctgttgaaattggcaccaaacagatcatgttagccaaatctacaagagcaaaatatataccagtttttgactgaatagaatcagcaatgttaataatattggatattggctatggaggcctcaatggatgggaccacagcattaaggtgtagtaatccatcaggaattttatgctgtttagagaagaataaaaacttaaaagataggaaataaactaaatgaaaaaataaactaaaatatatagctgggcaaaatgtattatattaattaatgcccaaagtttgagtgttggaagagggagagttgaattaatgcagagaccatgaacaaggaaaagtgaacatgtacttttattgttaaattgtgtgatgaataatgcaattgaccattataaatagaaattcaactacatgaagcatcaatatcttatagcccatcctgaggctatcgagatgctctaccttaaggacctcattagcataaactcaggggtcatcagtggggctcactattaataacaaaagacactcctatcactcaggacattccaggggtttcagcactctgagaggaactgatgacaaagaccaaatatatgtcctaccagaatcttgcttgatcttctctcaacttccttgatctgtgctttttgatgtctgtcagtaagtttggaaaactttcagtcattatcacttcaaatcggttttctgctcctttctctcctcctctaggattcattctcattatgcccatgttacatcttttataactgtccatagttcttggatattctgtttcagttccctccctctctctctccttctctctctttttgctttccagtttgagaagtttccatcaacatgtttcacactcacagattctttccttgatcttctgtattctgttgataagcccatcgaagacattcttcatttctgttacagtgttttttatttctagcatttccttttaatttttttttttgtgtttgcctctctctgcttatattacacatgtgttcgtccatgttggccactttctccattagaatccttagcatattaatcatagtttaaaatcctggtgtgataattccaacctctctgccccagtgtctagttgtgatagctgctttgtctcttcataatgtgtttcttcctgctgcattagtcttcttgggttattcttcttaacagaatgccacagactgaatgacataaacaagagacatttattcgctcacaatcctggaggatggaatgcctagatcaaggtgtcagcagagttgggttttggtgaggactctcttgcaggcgtgcagacagctgccttcttgctgtgtcctgacatggtcttcagtctgtgagcacacaccctgggtgtctcttccttttcctataaggactgtagtcttatttgtttagggatccatccttacacctcatttaaccttaatgacctctttaaggtctctgtctccaatacaatcacactgggggttagggctttaacatgaatttgctggggagggatgggcacaactcagtctagagcatttaccttttatcatgttgtgctatttttgttgatagccagacatgatgtatcgggtaagatgaactaaggttaataggactttactgcgaggttttatgtttatctggctagaattttggctgtttattatttgctgtagcagtagatttcaggggattaaatttcctctaatatccttgttggtgtctctgctgttgtctgtgggtttccctagaaattcctgtctgtctcttgcagctctatcagttaccatctactgttttttgtttattatgatttttatttattttattattttttgaaacaaagtatccctccgtcacccaggctggagtacagtggtgcaatctcggctcattgcaacctctgcctcccaggatcaagtgattcttttgcctcagttttccaagtagctggaattacagatgcatgccaccacgcccagctaatttttgtatttttagtagagacctggtttcggcatgttggccaggctggtctcgaactcctgacctcaagtgatccacccacctcagcctcccaaagtgctgggattacaggtatgggccattgcacctggcccatctgctgttattataccgcagacctgttgatgtggtgataaggtattgtggagaggcagcatttttgaatctcatgattacatctcatgattacatctcagttttattagtgagactgagtccctgggctgaccttcagaaaaatttcttagctttcttttcttcctttatttgagataggaagactagatggaacagactgactagttcttctcacaggtcacacacgatttggtaaagtagtttcctgggggcaggcttttgttatgtagcacagaatactctgggcttatttcaaaatgcttatgtttccttgggtgtgtcttagaatgattatttccccttcctcctgcttgaagcatgagataattgttctccagtcttcatcaggagaatctggtgggtctcctggaggcaaatctcatgaaaatacaggtgctgctcccatgataagactgggctcccaggattttttaagactaaggcttgtccaccattagcctccagcaatttgttaatcactgttcacctgtcagttgctggctccagaggcttctgtcctcaaaatctgatcccctatatttgctgtgtctccagtttgggggggcattgctttgccctatggcctcgatactctgatggatctaagaagagttactgattttcagtttgttcaactttttgttgttttgaggacgggagtaacaagctctttagatgttggagtggaaaccacaaatatatatatatgtactatttctcattatcaagttttatttcccccattcttttgtcaaaacaaatgttggatagttataaaagctttacagcatatttgtccactaatttcatcattttcatcatttttgtgcttctcaattcactcttctggttaatgatttttatgtcactacttctttgtgtgcatggttattctttattggatgccagatactgaattttacattattgaatgttgtatttgtttgtattgctttaaacaatgttggaccttggtatgccattcaataaaattacttagcagcatgatttcctcttgcctgcttggcactaggtctttctgttttaaacttttttagtataagaccagagcagccttgagtctgtcagccccgttctttaggtgatacctttctatctggtgttttctgtactaataggtgttccacactggcaggtgaacatacaattcccagccctggatgagctcaaataattgtttgggatattgctttgtaggggttcctttctaaacctcaggtagtgtctggtcatgcttgtgcagatcgggacttagccaaagatttacatggatacttctgcaaatctttgcctctctcctctctcctattatcccacctaaattatacccatggtggtcaccatatatacttatttttcttctacactgtaagcaggaataattgtagggctcacgtgttgtaacctagtgagttacagagaaacaccacactctgagacgaattcaggtgtcctttattagccagcgactgagagatggctagtgctcaaaattctctaggccccaaagaaggggctagattttcttttttactttggtttagaaaggagagggggggagtctagttaaaacaatcttacagaagtaaagcaggcaaaaagttataaggataaatggttacaggaaagcaaacagttccaggtgcaggggctttaaatctatcacagggtgacagatgcggggctttgggtgttatcaaccagatgaattcctaggaactgcggatatagctttccacagtatcttatcagttaattgcatccttggatgtgttgggaatctgcttgcacaagtcaagtcaagtccttgaggaagggagtgggtaaggggctgtaagtgaaggagccaagatggagtctgtctggctctctcagctaagggagagtcaattcaggttaaaacaaggttgggtatcacattccccacttgtgtttttggggaatcaaaccattgattcctcggttataaccagggggttatattgggttttaaggtacataagcttgacagaagctatatgttgttttacaaaattaagaaaccaatttaacatacaaggctcaaagactaagcctaacaataggggagaaagggtccagctaacccagtgattagagtagttagcaatggattccagttaaacatgctttggtaccagggggtgttattttctcgttcttgctggtgcctgtctaggttttctcaaactttttggagagtatcttttatgactccagactgattggcacagaagcaacaactctctcctagagtggcacataaccctccttgggagagaaatagcagatctaagcctcggcggttttgaagaactacttcagctagagattttacttgggtatgtagtatatttatggctgattggagattgcttaaatcagcatctacttgttgagacagggacattagtccagtttctccctgaaccagggcagccatgctgatggctgctgatccagctatgctaaggccagccaggaggggtacaaggagtggggtggctcggcaaaacctgggatgtaattcagggggagcaataagaagttatccttctggcccactatacacgtagacctgggggagtacatgaaccaacacacacaggagaggtcctggtttagttccattgatgtggcaagtgagacctgaagtgcaggctaaccaggtattgttaggtgcctggtaggagactgaggtgcttaaggaggtaagcatagactgattacaggtagcctgaaagggagaagcagataagttatatccggtgctaattagacaagaagtgtttccagacgtatctcctaatgggagggcatgggggcatgtacaacaagaaagagagccaattttaagtgcggcttctactcctaatccaatataatatgggggtttgtcctttaggcacaaccaacaatcttgggctagtttaggctgggtgagattgaggaggtgatgtaccccacctagaatggacatcaggctgggttggaggtgctgtcattgcaggtgaggtttggggaccaggaatggcagtgggacagttaaatcaaccttgtctggatgttttgggaacataaggtcatctaaatcagttaaaggcctgattggcttaggagggctccatgagacgaggattttttttggatggtgaacatagttccaacatcaaatcccgggatataaagccttaatccctatgacatgacataataccattgagctaaattaggattatggatgtttatagtgagaggattgcaatttctcctagtacacagcttaggacgggaagcacgagctatggaaagggttgaagatcgagttgatgccccagagtaggtggccaaagttacacatgtccagtcagggcagaaaaactggtaagaatcttgacaactagagttagggtgatttccaggacagaggtaaaagtcaacattctgaagtcctttttctgcacctttggagtttccacatccagtctggcttctggagtgtccaaattccacagcaaagtcgacgatacctgctcctatgactggcagattgcattgttcttcatgggtatgggcaggctctgggaacaaagtacataaatcaactgtaaaagagacttccttgagattcctgccttccaagtagtgtttgcaaacacacatcctgctgtgaaagaagtgaggaggaaagagtaggatggggcagaaggcataataggtggaaacaaacaatagaggtaaataaaaagaattaatctgatggcttcacttgacttaggggcagttttaaggggcctggcccaggcttggggacccatgtttcttgttgggctctgttgtcctttttgatgtgagattgatgaatccaagctggaatgccatctactttcagagccgttggtgtggtgaggatgacagtatgaggtccttttcaggcaggaatgagtcctttctggaactttttaatgtacatgaggtcacccggctggaaagagtggtagggccccgtctagtcaggaactggattggggtgagctccccggacaagcggctggatgatgtcttgtacctgttggagagacttcctgatttttactggcctgaagatccgaagcctgtttttcctcctctggggaatattttgggtgatctggcaagtcaggttgcagaaaggacactgcaggcagcagggtcagaggtgcaacagggagacgagctgcctcctaggctgtagagtctgctttttggttaccatgggcaatggccatgtcttctttttgatgtcctttgcagtgaattacagccacctgctggcagtgcttgggcctacagtatatccatctctgtagtgatggcagcaccagccttttgaactccctgctcaaggaagctgctaccatctctaaacacggtggcttctgcctcctttaaagatacctcttggagatcaggtcggccagattccgtagtctccaacggttcttggcagtcatggacaggtatagtaaggtctgtctcttggtggtgggagtggggattcacaggatggcttcacactggtgagtgccctttttcctttctttatcttgtaccttaggtaggacactctaagaagacaaagctgggcctttttggccgagatccaatacctgagcacctgaaggaggtaaagtaggtccctagtatgttgcaggcagctgtcagtagtttcagtagccaataagtcatctacatactgaagaatagtacaattggggtgactggctcagaatggtataagatcctgttggagggcttccccaaaaaggatgggggaatttttaaagccttgaggtaactgagtccaagttaattgggtggtatctcctgagccaggatctgtccattcaaaagcaaagataggttggcttttgggggccagaggaatagcaaagaaggcatcctttaagtcaaggacagtgtatactgtatgttctggtgggagcaggctgagtaaagtataagcattgtggacagttggatggatggtaactgtccacttgttaacctccctcaagtcctgcacaggctggtaatcatttgttccaggtttctggaccggcaaaaatggagtattccaggtggattgacatggtgtgagtatgccagcttgtagcagtcactgaatatggagatttatcccctctctagcctgctgactcataggatactgttttatctggactggcagggcagtggccagaagttctacaactactggcagatgatgctttgcttatcccagggggtttgactcagcccagactcgaggaaacagtctgtaggtctaataggaggagagaatttgttttattctccaatggttgtgatggtgaaaccaaaagatattcctctgacagaggggtagttagcaggagttgggcagtagggggcgttgtgtcccctaacgtgaagtgagcctgctgggctgagagatagaagcctgtaacttatggagcaggtctcatctgagaaggggaagggggcactctgggactacaagaaatgagtgagttactcttttctttcctaaactcacttatcatgagtgggtgacaggatattcctgaatagctcctgttgccccttgtacagctactcttttattagagacactgcctaagggtgtctgcagtactgagtgttccacctcagtatctattaggaagtatacatgctggccccccactgtagcggtcaccatgggctcctgggggccaagtgaaagggagccccagtcccatcagtcatcagactcctccgctgtggggagggtgaggacctttttcttttctggtttttgctctggctttaatgggcattccttcttccagtgtcctatctgcttgcaataagcacattggtttttctccaggggagcccgctcacctttcttgcccttttggctgggacccggggttccctggctattcctctgtgatgggggcccttactttttggcttcctggatggccaccactaagatttttgcttgtcttttggatgctttatcagcagctttttcagctgcctcagctgcctgttttcgtttttcagactctcgattgtcaaaaactttctgggctacttctaaaagctggctattgttcattccagcaaatccctccggcttttgtaattttcttttactatcagtagctgcctgagccacaaacaccaaattaatagcacggctattcttgggagctgccgggtcaaaaggggtgtaagtttgataggcctcctggagactttctaaaagtgttccaggttcatcaggcccctggacaacttcagttgtctcagacagatttatgggtttttgagcggctcccttgaggcccacaaggagataccggtgaaaatcatctaaagccctcctcccacccgaggagttaggatcccaattaggccgggtagagggaaaaacctccttaacgaggttttgggcttccccctctggtctatcagctgatgtaaggaaatactttctggcttctcttcggatacaattcctctcttcagagatgaagagggttaaaaggcgttgctgacaatcatcccaggtgggccggtgagtctggagcatggactccatcagtgaggtcagaacctggggtttttcaaagaaggggggattatgagccttccagttgtacaggtcagaagtagagaaagggacgtaaactaagaatggagctgagcgctcatcacccggagggatttgtgcctctctcagtgggaggaggggggctacctcctcctgccatggccacaatcaggaggcaatagatggggacgccacaggagatgtagttgaggaggcaaggggagattctgggggagcaggagggttataaggtggcagaactgtgtgaggaaaactttcctcttcttcagagggaggcaatacaggaggagccaagggagctgaggatccggacaaaagtgtgtggtctcgcttaaaatgaccttggaggtaagattatgaatggcacatgagcggagccaagggggagggctccggaccaatctcagccattgatcaatgtagggaaacggatcggggtgaccgggagttccagcaacgacccgccacacagcctgaagagctgtgagattcagtgacccttctgggggccacacggttccaaactgtggtcattctacttcacagagtatctggagtttgccttttttaaggtggaccccataattctctgagaagcctagggagaaattttgtaacatacattggagagggctccaatctttatgaggctgggaagaagagtttcccattctggaggcaatttaaaaaggtttcagcagaaatattaaacccagcacagacagagaaattcaagacctggggggctgcagtatcagaagaacagaagtattataaccagaagaagaaggaaaacaaccatagtcaacacttcttgccacataaggacggtctgtttaagctttgagatctagggggaggacaagaggcaggtctgaggccagtgggacctacgtgatcccctcctttttgtcctatagcctaaatatctttggtgtctccatgacttgaaggcaaaaagttcaaacttggccttttcttttaagggttgaaaaagggaggacagaaccaagtcttggagacactggatttgctgcaacacaggaaaatgagatgtgcagggtaaaggatgggaatgaggaggaaaaggggccacttggatttttccaggctaggaggagccatgccgggcagctctgggtcaccagggccactctgcggtcccccgccctgcctccaggccctgtcagacgctgcaagcccagctcagaagcctggcctgggaccaagttcactgcagcaggctgggcccttgcattctgagctgggtgcggatgcgctggtgctctgggaagtcaggggctttgacaactgaaggcaaaggagccgggcacctgagggggtcccgggggagggggtgccgggggaggggatccggcgtcgtcaccctccagtccttgcccacaggtcagggagcccctgccatgggggaaggaggctgtttcttttgtaaactggtggaggcgtgcctcgcccctgggcctgacagcccaaagagacacgcctgagacctctggacagagtacagcagtatgggcgtaggtttctctgcacagtgccttatccatgggcacgggaaaagttatgggatgacagaaaagatgagcaaggaggtctgtggggtggctattttgaatccaccaccggtctaatgtggaggtggtccagtcaattgggcatggggtatggcaatctaaatgccagcaacctttaaggtgccagaaatcccacactctttcccataacaacacctgatttgtttctgacagaaaaggcaggactgggatggccaacccaaatgattgatgagaaatttgacctcctgtgatagaaaatcagtactgaggaccttgaagaagttcttacccagttgtctagggcagtattgatgacctgacatatgaaattttaccaaacaagacaatagaccctggggcatacaaacaattatgacaattttttaatagacagacaaaggaaggggggcccgtgatgggatcagtcagatgcccatctggccactctccctgaggggacttaggctcctcttagcattggcaggctggtataaacccctggcttggatcgagctatgcctgatgctgccttaagccttaagaggtcaccacggaactgcaggtgagggcccattcaaactccgtagctttcaccgtggagctacatactggaaattcaagtgcaagcccttgaactccacattcacgcactcattcacacagagtttataacagttttcttattccctttccaaaacagaggtctccgggagacctgaacgagagaaggagaagagatagagaaagagggagggagggagagagagagagagaaagagagagagagatagagactagtcttaacagagaggcctaacagaaaaccaggactctgtcctccagtgtcctggaacatgggcagagtcaagggagggccatcgtcagggctgcttccctcccagagagacacagaggtgcctaacagaaaaccaggactctgtcctccagcgtcctggaatgtgggcagagtcaaaaagggagggccttgtcagagccgtttccctcccagagaaacagagtcagatctgacttactttcccaggaccagaaactgaggactcaggagttgaatttttgtgggcacacaccagtggtcgatccattcccgtctggaagatagggtcttatggggccctggaacgtcttctggtggtgcctcccctataagtctgctgtctgtccaggggagcctggaatgagtctggctctcacccggtgacaaaaaaatcttgctggggcctccaaatgttgtaactgagctaggtacagagaaatgccacactctgagacgaattcaggagtcctttattagctggtgaccgagagacggctagtgctcaaaattctctcagccccgaagaaggggccagattttcttttatactttggtttagaaaggggagggaggcagtctagtgaaaacaaccttacagaagtaaagcaggcaaaaaagttaaaagaataaatggttataggaaagcaaacagtttcaggtgcagggctttaaatctttcacaaggtgatagacgcggggctttgggtgttatcaaccagatgaattcctaggaactgtggatatagcttgccacagtattttatcagctaattgcatccttggacgtgctgggagtcagcttgcataagttaagtccttgaggaaggggtgggtaaggggctgtaagtgtaggagccaagatggggtctgtctggctctctcagctaagggagagtcaattcaggttaaaacaaggttagctatcacacacatactttgtatcttcttccttgagatcccagtccttcattgcctcttgtccaatgcttgaaaattgtgttactgttttcatatattgcatctggttttcttcttgttgaaagcaagaaaaaattctggtcatttcattagatcatggtctgaggcagaaatcaggctcattcttaatttattaaatggcttataatcaattctattaatatttacttatattctcaagttctccaggaaggataccccaaaaattcatattcacacacgacatgcttcatttcttgattgagccaacaagatctgttcaatcaatcttggctttggaagagctcagagcaaaagttccaagcaaggtcttttatgtttctctggctaaatgaccagaaccagttgtctagacactcatgccaggtaaaggtgtcttagtctgttcaggctgttgtaacaaaaaccataaactgagttgcttatgaacaacagagttttattcctcgtagttctgaaggctgggaagtctaagatccagatgccagaacattcagagtctggtgagggctgctttctggttcctagagggtgtcttctagctgtgtcctcatgtggctgaagggtcaagacagctgtctggggcctcttttataagggcactcatcgcattcatgggacttccaacttggtgacttaatcatctctcaaaggccccacacctttcaaaaccatcatattgatgattagatttcaacacaggaattttggggggatacaaacatttagaccacagcaaaagccattggtagacacaatggcccttggggccatgagggattttagattaaaattttttttttattatacttttaagttctgggatacatgtgcagaacgtgcaggtttgttacatagctatacatgtgccatgggggtttgctgcactcatcaacccaccatctacacattaggtatttctcttatgctatccctcccatagccccccaccccccaacaggccccagtgtgtgatgttccccttcctgtgtccatgtgttctcattgttcaacttcaactcccacttatgagtgagaacatgcggtgtttggttttctgttcttgtgttagtttgctgagaatgatggtttccagcttcatccacgtcccaacaaaggataggaactcatccttttttatggctgcatagtattccatgctgtattatgtgccacattttctttgtccagtctatcattgatgggcatttgggttggttccaagtctttgctattgtgaacagtgccacaataaacatacgtgtgcatgtgtctttatagtagcatgatatataatccattgggtatatacccagtaatgggattgctgggtcaaatggtatttctggttctagatccttgaggaattgccacactgtcttccacaatggttgaactaatttacactcccaccaacagtgtaaaagtgttcctatttctccacatcctctccagcatctattgtttcctgactttttaatgatcatcattctaattggcatgaagcagtatctcattgtggttttgatttgcatttctctaatgaccagtgatgatgagctttttttcatatgtttgttggctgcataaatatcttcttttgagaagtgtctgttcatatccttcacccactttgatggggtttttgtttttttcttgtaaatttgtttaagttctttgtagattctggatattagccctttgtcagatggatagattgcaaaaatttcctaccattctgtaggttgcctgttcactctgatgatagtttattttgctgtgcaggagctctttagtttaattagaacccatttgtctattttggcttttgttgccattgatatgggtgttttagtcatgaagtctttgcacatgcctatgtcttgaatggtattgcctagggtttcttctagggttttcatggttttaggtcttacatttaagtcttgaatccatcttgagttaatttttgtataaggtataaggaaggggtccagtttcagttttctgcatatggctagtcagttttctcaacaccatttattaaatagggaatcctttctctgctgcttgtttttgtcaggtttgtcaaagatcagatggttgtagatgtgtggcattatttctgaggtctctattctgtttcattggtctacatatctgttttggtaccagcaccatgctgttttggttactgtagacttgtagtatagtttgaagtcaggtagcatgatgcctccagctttgttctttttgcttaggattgtcttggctatgcggggtctgttttggttccatatgaaatttaaagtagttttttctaattctgtgatgaaattcaatggtagcttgatggggatagcattgaatctataaataactttgggcagtatggccattttcatgatattgatgcttcctatccatgagcatggaatgtttttccatttgtttgtatccagtcttatttccttgagcagtggtttgtagttctcctcgaaggggtccttcacatcccttgtaagttgtattcctaggtatttgaatctctttgtagcaattgtgaatgggagttcactcgtgatttggctgtctattattggtatataaaatgcttgtgatttttgcacattgattttgtatcctgagactttgctgaagttgcttatcagcttaaggagatttggggctaagatgatgggttttctaaacatacaatcacgtcatctgcaaatagagacaatttgacttcctctttccctaattgaataccatttatttctttctcttgcctgattgccctggccagaacttccaatactatgttgaataggagtggtgagagagggcattcttgtctggtgccagttttcaaaggaaatgcttccagtttttgcccattcagtatgatattggctgtgggtttgtcataaatagctcttgttattttgagatactttccatcaatacctagtttattgagagtttttagcatgaagaggtgttgaattttgtcaaaggccttttctgcatctattgagataatcatgtggtttttgtcattgattctgtttatgtgatggattccatttattgatttatgtatgttgaatcagccttgcatcccagggatgaagctgacttgatcatggtggataagctttttgatgtgctgctggattcggtttgccagtattttatggaggattttcactttgatgttcatcagggctatcggcctgaaattttctttttttgttttccgtctgccaggttttggtgtcaggatgatgctggtctcgtaaaatcagttagagaggattccctctttttctattgtttggaatggtttcagaaggaattgtaccagctcctctttgtacctctggtagaattgggctgtgaatccacctggtcctggacttttttctgttggtaggctattactgcctcaatttcagaacttgttattgatctattcagggattcaacttcttcctggttcagactcgggagggtgtatgtgtccaggaatttatccatttcttctagattttctagtttatttgcatagaggtgttcgtagtattctctgatggtagtttgtatttctgtgggatcagtggtgatatcccctttattattttttattgtgtctatttgattcttttctcttttcttctttattattctggctagtggtctatctattttgttgatcttttcaaaaaaaccagctgctggattcattgattttgtttgaagggttgttcatgtctctatctccttcagttctgctctgatcttagttatttcttgtcttctgctagcttttgaacttgtctgctcttgtttctctagttcttttaattgtgatgttagggtgatgattttagatctttcctgctttctcttgtgggcatttagtgccataaatttcccactaaacactgctttaaatgtgtcccagagattctggtacattgtgtctttgttctcattggtttcaaataacttatttatttctgccttcatttcattatttacccagtagtcagtcattcaggagcaggttgttcagtttccatgtagtggtgcagttttgaatgagtttcttaatcctaagttctaatttgattgcactgtggtctgagagacggtttgttatgatttccattcctttgcatttgctgaggagtgttttacttccaattatgtggtcagttttagaataagtgcaatgtggtgctaagaagaatgtatattctgttgatttggggtggagagttctgtagatgtctattaggtctgcttgatccagagctgagttcaagtcctgtatattctttttaattttttgtcttgttgatttgtctaatattgacagtggggtgttaaagtgtcccactattattgtgtgggagtctaagtctctgtaggtctctaaaaacttgctttatgaatctgggtgctcctgtattgggtgcatatatatttaggatagttttctcttcttgttgaattgatccctttaccattatgtaatgcccttctttgtctcttttgatctttgttggcttaaagtctattttgtcagagactaggattgcagcacctgcgttattattattattattattattattattttgctttccattttcttggtaagtattcctccatccctttattttgagcctatatgtgtctttacatgtgagttgagtctcctgagtacagcacaccaatgggttttgactctttatccaatttgccagtctgtgtcttttaattggggcatttaacccatttacatttaaggttaatattgttatgtgggaatttgatcctgtcattatgatgctagctggttattttgcacattagttgatgcagtttcttcatagtaacaatggtctttacaatttggcatgtttttgcagttgctggtaccaattgttcctttccccatttagtgcttccttcaggagatcttgtaaggcaggtctggtggtgaaaaacctctccgcattttcttttctgttaaggattttatttctcctttgctatgaagcttagtttggctggctatgaaatcctgggttgaaaattcttttctttaagaatgttgaatattggcccccactctcttctggcttgtagggtttctgcagagagatccactgttagtctgatgggtttccctttgtgggtaacctgacttttctctctggctgcccctaacatttttttccttcatttcaaccttggtgaatctgatgattatgtgtcttggggttgctcttctcaaggagtatctttgtggtgttctatgtatttccttaatttgaatgttggcctgtcttgctaggttggggaagttctcctggataatatcctgaagagtgttttccaagttggttccattctcctcgtcactttcaggtacaccaaacaaacgtaggtttggtctttttacgtagtcccatatttcttggaggctttgttcattccttttcattcttttttctctaatcttgtcttcatgctttatttcattaagttgatcttcagtctctgatatcctttcttctgcttgatcaatttggctattgatacttgtgtatacttcatgaaatacttgtgctgtgtttttcagctccatcaggttatttatgttcttctctaaactggttattctagttagcaattcatctaagctttttttcaaggttcttatcttccttgcattgggttagaacatgctcctttagctcagaggagtttgttattacccactttctgaagcctacctctgtcaattcatcaaactaattctctgtccagttttgtttctttgctggtgaggagttgtgatcctttggaggagaagaggtgttctggtgtttggaattttcagcctttttgtgctggtttctccccatcttcgtggatttatctacctttggcctttgatgttgttaacattcagatggggttttggtgtggacttcctttttgttcatgttgatacaattcctttctgtttgttagttttccttctaatgggcacctctgctgcaggtctgctggagtttgctggaggtccacttcagaccctgtttacctgggtatcaccagcagaggctgcagaacagcacagattgctgcctgttcattcctcatgaagcgtcatcccagatgggtacccaccagatgccagctggagctctcctgtatgaggtgtctgttggccccttctgggagttgtctcccagtcagaaggcatgggggtcagggaccgacttgaggaggcagtctctcgcttagcagagttcgagtgctgtgctgggagatctgctactctcttcagatctggcaggcaggaatgtttaagtctgctgaagctgtgcccaaagctgccccttcgcccagatgctctgtcccagggagatgggagttttatctataagcccctgactggggctgctgcctttctttcagagatgccctgcccagagaggaggcatctagagaggcagtctggctacagcgggtttgcagagctgtggtgggctctgcccagtttgaacttcccagtggctttgtttatgttgtgaggggaaaactgcctactcaagcctcagtaatggtggacaccccttcctgcaccaagctttagtgtcccaggttgacttcagactgctgtgctggcagcgagaatttcaagccagtgaatcttagctcactgggctccatgcagatgggatccactgaactagaccacttggctccctggcttcagtcccctttccaggggagtgaacagttctgtcttgctggcattccaggtgccactggggtatgaaaagaaactcctgcagctagctcggtgtctgcccaaatggctgcccagttttgtgcttgaaacccagggccctggtggtgtaggcaccagagggaatctcctgatctgtgggttgtgatgactgtgggaaaagcatagtatctgggctggaatgcaccattcctcatagcacagtccctcatggattctcttggctaggggagagagttcctcaatcccttgtgcttccctgttgaggcaacaccccatcctgcttctgctcaccctccatgggctgcagccactgtctaaccagtcccaatgaaatgagccaggtacctcagttggaaatgcagaaatcacctgccttctgtgttgatctcactgggagctgcagaccggagctcttcctattccatcattttgccagccacccttcaggattttagattttaaagagctcttcatgaatctcactagtttattttaccaaacattaaagatggatacccaggaatctccagagataagactagagcggtgctgggccagtatcatattacacaacagcacagcatacaaaaagaattgtggggccaggtgcagtggctcatgcctgtaatcccagcactttgggaggctgaggcaggcagatcacctgaggtcaggagtttgagaccagcctggccaacatggagaaaccctgtctctactaaaaatacaaaaattagccaggggtggtggcgtgtgcctctaatcccagctacttgggaggctgagacatcagaattgcttggacccaggaggtggaggttgcagtgagccaagatcctaccattgcattccagcctgggcaagactccatccaaaccaaaaaagaattgtggatgctgctaaatttgtagattaaaattcctatctcaggaaagaaatgtgtcaaatcaatgacagattcaacctaaaaaacttcaaaaaggacaactgaaactcaaaataagaaggaaataataaagatcagcaagaaattaatgatatggaaagcaaaataacaatggagaaaaaccagtgaaatcaataactgattttttgaaaagatcaataaaagagatccacctttgtggatctagcatgaaataatgtgagaaaacacaaattatcaatgttaggtacaggtgaggtgacatcactagatactatagattttatttattcatttatttttacaccccacctggagtgcagtggcacgaccatggctcactgcatcctggaactcctgggctaaatcaatccactggcttcagcctccagagtagttgggcctacaggagtgggccaccacacccagtttttatagattctaaaagggtaataaggaataatatgaataatcttattccaataaatttcacagtggccagtttgaaaacaaacaaataaaattgaacttatttttgacaacattgttgcaggaagtcagggatcctgaacagagggactggctggagccacagcagaggaccataaattgtgaagatttcattttaatatggatataaatcagatcccaaataatacttttataatttcttatgcctgtctttactgcaatcttggaacataaattgtgaagatttcatggacatttatcagttcccaaataatactcttataatttcttatgcctgtctttactttaatctcttaatcctgttatctttgtaagctgagaatgtatgtcacctcaggaccactattgtacaaattgattgtaaaacatgtgtgtttgaacaatatgaaatcagtgcatcttgaaaaagaacagaataacagtgattttagggaacaagggaggacaaccataaggtatgagtgcctgcggggtctggcaaaaagagccatatttttcttcttgcagagagcctacaaacagacatgcaagtagggaagatatcactgaattcttttcctagcaaggaatattaataattaagaccctgggaaaagaattgcattcctggggggtggtctataaatggccgctctgggagtgtctgtcttatgcggttcagataaggactgaaatacgccctgtctcctgcagtatgctcaggctcactagggggggaaaaaccccaccctggtgaatttgaggttagacgggctctctgccctcgaaccctgttttctgttgtttaagatgtttattaaaacaatacgtgcacagctgaacatagaccttcatcagtaattctaattttgccctttgccttgtgatctttgctttgccctttgccttggatctttattgacctcagaagcatgtgatctttgtgacctactccctgttcatacaccccttcccctttcgaagtccttaataaaaacctgctggttttgtggctcaggtggtcatcacggtcctaccattatgtgatgtcactcctggaggcccagctgtaaaattcctctctttgtactctctctctttatttctcagaccggccaacacttagggaaaatagaaagaacctatgttgaaatattgggggcaggttcccctgatacaatataaatattaatggagaaaatctcatggaatctgtgaacaaaaatgtagaataaatgaaattatagtttccagggtagacaatgatttttataaaaattatacttctatgtacagtttgaaactgaaatttaaaagagtactttttttttgagaaggaatttcactcttgttgcctaagctggagtgcaatggcatgatctcggctcactgcaacctccacctcccagttcaagtgattctcctgcctcagcctcccgagtagctgggattacaggctcacgccaccatgcttgggtaattttttgtatttttagtagaaatggggtttatccatgttagccagcctggtctcgaactcctgaccttggtgatccgcccacctcagcttcccaaagtgctggctttttacgagagcatacgatatatacttgagacatatatataagatgtgcaactgaaatacatataagatgtacactataaactacaaaatattgtggaagaaaattaaagatctaaataaagggagagatataccacatttatggattagagcacaaaggcttccctttgtgggtaaactgacaatgttttaaacccattaatgttttaattcttttcaaattggtgtgtgtgtgtatatatatatatatatatttatttattcaatgcagccgggcacggtggctcatgcctgtaatcccagcactttgggaggcagaggcgggtgggtcacaaggtcaggagattgagaccatcctggctaacatggtgaaaccccgtctctattaaaaaatacaaaaaattagccgggtgtggtggtgggcgtcggtagttccagctactctggaggctgaggcaggagagtggcatgaacccaggaggtggagcttgcagtgagccgagatcatgccactgcactccagcctgggtgaaagagcgagactgtgtctcaaaaaaaaaaagaaaagaaaaaatatatatatatattcaatgcaatctcaatcaaaatcccatgatgcttatattagaaaataacaagtgaattctaaaatttatatggtaatgcataaagtaaggacttagaatagcaaaaaaattgaaaaagatgcataaagttaaagaattatattgcctgatttgtagacgtattatttaattatgttaagtagactttaaaatattagcaaaaatatagattaagaaagtccaggaatagaccaacacatctaagatcaaatgatattttagaaaggtgcaaaggcaattcagtgaagattgtgttttcaacaagtgttgttggaacaactggacatccatattaaaacaaaacccaagaaacaaaaccacaagctgtgaccccaaacctcacatggtatataatattcaagaactaactcaaaatggattataaacctgaaagtatgaaaccttcattaagtaacatgagagaattttttaaatcttggcaaatacttctgaaatatgcaccaaaaacatgttcaatctaaggaaaaatgacatgttcaactttgtcatcagtaaaaatttctgctctagaacagactctgttaagatgaaggagaaaatgaaccttaggctagaagactatactggcaaatcacatatctacagaaagacttgcatccaatatttactaaaaactctcaaaactcaataataaaacaaaaaagtttaaatgggcaaaagatttgaacagacagttaaccaaagaagatagagggatggcagtagtacaaataaaaattgtaaacattagtcattagggagatacaaagtaaaatcacagagaaataccactacacaccaagtgggaatggtgaaaattgaagactctctataccaagtgttggtgaagatatggagtacctgaaatcctcataacactgtggagggcatgtaatgtagtataaccactttgaaacacaatttgtcagtttgtaaaaaggtaaacatccacttaccctgtgacttggtgtgcttatgctttttattttctgcgttttatgatgacatcttttaaagtttactggctctggagagactgccctcccaggattagtcttttcttagagatggcaaagcgcttgacccagagcacctctctcatatacaaccaactgatcctgagtctacagccccaattacctctttatccaactctcacacccccatgccaatatctcccctgcactgaagcaccccacgaccaggtaccaggtaaccagagaccaacactataggccaaagcctgccggagttattcaaattagctaaccataagctgtttactctgccctgcctggcctgtcccatgaaaactccaataaaggctgttgcctatgccttccccttgctcctgcctcctgatcaacactggtgctctccatgtggccctgtgtggcatggtgtgcccctaggaaatgtaagtaataattgctttccattgcattggcctctctttgtggtcactcagtcaccaccttaagttaaaatcccacaggtagaaatgagacacatttcttcgtgtgtccgtgtgtgtgtgtgtgtgtgtgtatgtgtgtgtgtaagtgggggcagggcacgtctgcagagagacccacggccctgggccatgcctttgggtgacagtgtatcagaaactaagctcagcatgcagtgggatgggttgggtgttgctgtgacatcctctgtcctccctggagcaccgtgggattgggagcaggctgagcactgtggcgccagcccgcaggtccatgtgtgcatgtgcacccaggaggccctgaggcatgaccgtgtgtcttggcaaacatgtgtctgcacttggctcgccctagcacagaatctgccaccgagtgccggttcaacaaacatttgataagtgagtttgtttgtctgaatgggtagcagattaggtgcagctttcgagaaaattagtaaattgtagtttagattcaaggaacattacctggaataaaacgcagaacctaaaggatgtgaggtatagaaagtgcgttaggatcacatgttacacagtgaaaaggtcctacatatgtgggtgttgaagccacttgcctgtgacttctgtcacctgactggaccctgattgaccctgggtgaccaggggcaaaatcagcagaggggcgcagctgggggtgcttgctggcctggccactcaccgagctgtgagcagcaggggaagctccacccagggccctagtgagtatgggtgtggggggaggggcacgtgggtggccctgatcagtgtcagggtgagctccccccatcccaccttcctgttacctgtggagggtgtccagtttcttgccgttttgaagcaagaattggaaaaaaaaaaaaaaaccgcacaaacagagcaaggaaagaatgaagcaacaaaagcagagatttactgaaaatgaaagtatactccacgtgatgagagaaagaatgaagcaacaaaagcaaagatttattgaaaacaaaaatacacactacatggtcgggcacggtggctcacgcctgtaatcccagtacattgggaggttgaggagggcagatcacttgagatcaggagttagagaccagcctggccaacatggtgaaaccccatgtctactaaaagtacaaaaactagccgggcgtggtggcacacgcctgtaatcccagctacttgggagactgaggcacgagaatcgcttgaacccagtctgcactccagcctgggcgacagagtgaggactccgtctcaaaaacaaaacaaaacaaaacaaaacaaaacaaaacaaaacaaaacaaaacaaaacaaaacactccacatgatggaagcaggctgctgggagcaggcccgagtataggggcccccaggttacagaattttctggggtttgaataccctctagaggtttcccattggttacttggtgtccatcctatgtaaatgatgcagtggcccacaatcagtctgatcggttgcagaaagcaaacagaggctgaggtgaaattacaaaagttacaccctatgcaagcatctgattggttgtggcaagcaattggttgttttctgcaaccaatcagatactttcaattttccatctgccacacagaaaaaggggaagtaggcttgcaaagggagtagtctctggtccttttcttacttaggtttgaaaaattgttttctgtttgatttagttctaggaagtcagagtgaatcggccttaggttccgtgcctccagaccctgttctcctgcctcattcctaccaagctgctccctgcaggggcctgatgccctcagggaagattctatgtattcactgtctggggctgctcaagccactgctctgcgcagccctgcctcccactggccttctcaatggctttccgctcagggaacccctgcagcctgtagtctccaggcaggccttgggccaccaggctggagagagccgcggccacactcagcggtgcaaggtgacccggctgtcttcctggcaggtcctcgtgggagcggctgtcccttgttcaggggcccgggaccgcgtccccgtcccccgacatgtcccccaagcatgccttcagggcagggtgcagactggaaggctggactggcggggacacgcgtgttctgcatctcctaacgctgtgcccactgtgggtgggacggtgactggcttgggtggggtccaaggcgggggtgacgaatgacacccttggagagggggcctgcaaagggcactgtctgtggccacgtggttactgtgggatttggccttggggaatctgatggatgttgacagccagttcctgcctcttttcctcttctggagcccccttgctagcaccgcgaaaaaccccgcacagctccagccgcggggctcgctcaggagcggccgcgaggggacacccaggttgcgctgcaggaaagcccttgtctgagcagggcacggggctccacgacaaaaggacacgatttgacttaaattatgtttttcccttgatgatattttcattttctttaaaaggatgtagttttcttggaccgtggaccaagcttatttcttaaacagattccagcaaactcacaagtgtccttcagctctaggcctgctgtgtgtgtgtgtgtgtgtgtgtgtgtgtgtgtgtgtgtgtgtatgtgtgtgaatgtctggggccaaggccagggatgactgggctgtggtgagaacctgacccttcccagtcttccctgatttctcttgttcctgcagctacctagtttggggatggatggggaaggaggccccaggatgagtcctcacgtctctgcatcccactgggggctgcgtacaaatggatgaggaccccccccttgaaaggctcctgggtggtgtaggccctggatgggagagttggggggtagagctggatgtgggatctagatcagggatgcttggggcttttgatgccctgatatgggattgaggagggggcatggtcaatgctgaatgggtgtgaacagatgactggggatggggagcaagggagattctggtgggggaagcacgggaaggttgaggtcagagctggggaagctgaattccaggttgaggagaaggaggtgtggtcgcagattgcagggaacccagaggacttgagcagggaaccctctggccaggtgggtgtggcagttgacattggagttggggtgggggtggagtcgggggtggagctgcagatggcaggggcagtgttgaaggtggagggtgacggttgaggcagggaaggggcagtggggtggggataccccatcaggttgtcccatgcctctctgagagatgcctgcccttccacccgcccttctggggtcagtccctcccacttcccccttggctgaagaacacacacagaagctggatggatgcaggtgagtttattaggcagcattgtcccgcaggggacaggcctgggtggggaggtggggggcagccgttcccaggcttgccccaatcagcacagcaggagagagagtagaggcagcagcagggcgggagctagggagggtggggccctgggcccagattctcatggttgggacaggcagcctggacaggaacccgaggtgcctatggatggtgttacttcagtatcgtgtcggcacactggttgttgatttcttcctgtggggaggggtgggaggccgaagggaggggtcttctggggaaggagggataggatggggttgattgcggaggctgagcatcagagcgcggaggtccagcgccctgaggtcttgtccctgggcagctgcccgtgtgagaggtggttgcttggtgagaggtggggaggtatttgggtggagagagaggctctcagggaacagagtccctgctctcaaaggaggtcaagggctgtggggtggcgctggtggccgggccctgctgcactcaccagttgctgcacgacggcctctgtctcctcgggggtcattgtgtcggtcacgcagtccttgagtttagaggatgtgtttctttccggctccgtgaggtggtatctgttgacagtgtccatgtaggtgtccttgtccttggtcagaaactggttaatgaccgtcataagctgcgggcagagtttcctgggctctgcggggagagtaggagcgtgtgatcagggaggggtgggtgccccggggctgcagcgcggcccgggcttccctggcggggcctacctgcgagcagcggcagcagcaggagacccagcagcgccagggctcgggcggacgccacgcggttcggggtcggggccggtaggtatgcgggtcacactggggcagtgcggacgcaggtccctctggcatctcgggagacgcggtccttaaactccgtgtcctgggggcgggcccgggtggcgtggcttggctggacagggagggtaggggcggtagtggggtttgtggcactccagcgtagcaggttgcatctgcgggtccccgcccctgccccgcccccagcccctcccatggtgctggatccaggcagctgatgtgcaggcggggacccctggctgggcgcggtcctgggcgcgtccctgcgcggttcaggcttccatgcgcgctgagactccgctggctctgtggcctgccccgtcgtgtgtgcgtcacgaggcttgggtgcacgcgtttgagaatgggatatgtgtgtgtgagtggaatgcgctggtgggagcgtgtggggtgtgtgtgtgtggcacctgaggttggggtgttgactgtgtggggtgggggtctgtgattatatgaatatgagggtgtgattgcggctgggacagggcatgtggctgcctctgcctctgcatctgagagagacaagaagtgatgggagagtcttgtgtgggggccctgcggggcagggacaggggacccttcttcactttatgccatctggaggtgaaaagccagctaagtagcaggcttcatcctggagacagaggctgggagactgcagctgaaaggtgtgggttccgggagggctgcagggggctgagcagcagcgtcagggagcagagggccgccctccctccatcttccttccttctctggaccccagagcactgtgtccccctcccacccctacagctgcaggtggagccagctggaggggtctttagaaggaagggggtcctctgagggcagagagggccaggaggctccctgaggacctgaggcccctctgggcctcccagggctgggcctgtggtctgatctgctttgccctgggagagacgtgctcagtggtggggtttgtgtagctgtcactcagtcacctgcctgtgcccagccacacacctgtgactcccatgggccccacccaatacacatgtgggtcttcaagtgccgtgaggggaagttcctgcctgtgtcacatgcatccatcccacccaccacactgcaggttacaggactgccccacaagcgccaccatgccagcctgacgttacctggcacacaggtatcctcacctgcatgacatgatcagatcatgcactttctatgccagggccagtgccagggcaagcttgtatcttcagctttggggacactgtggggcgggtggtggctggaggccagggaagtcaccaggctggagagggttgatgtcagacatctcccgtgcaccactttgagccacctcagcctcacctgggactctggctggcactgggactagcagttccatgaaggtttagagcatctctaggcttaggaagggcctcccttgtcatcactgtggtccgggctgcatgccttgtgaccaagggctctggacagcagatgcagccagccagagtgtgggggtgaggggcctgggcacaggagggatgggaggccttccctgcacccccatggccaccatttcagagggaggacagcaattatttgggtttgtcctgtgagcggtggcagagagaaggccccagggcaggtctagggccagacaggcaccctctgctgcagcctcggggccaccaggcacgtgatggggccggtgtggggatgtcccctggccaaacacatgggtagggggtgctctggggtcagtgggtgggtccgggcgtttgcaagagccatgttaagatagacagtcctgaaggatggagggagggggcagaggggtcagagaatggatggatgggggagacggctcctgccgcttcctggcctctaagtgggggtgatgggtggtaggtgagtgcagtgggagctgcaaggctgagccagggaagtggaggcagcagagatgcagaccttgcctgaggctgactcgggactggggcttcttagaggccagggccctagagctcctggacagggagtttgcaggaacagtgatgcagcatacaacacagcacaactcgacacaacacaatctgccacagcagagcagcgtgcggtgcactgggctgcagcagagcatggcccagggtccagggagtcatgtaggctccagggaatcatggagcaaactgacctgagccgcatccctcagccaaggcacaggcccccagccttgagccacccacttccttgggacagctggatgccctagtgtccctggggctgaggatggggctggggctgctgtccaaggtgaggtctgactctaatcccctgtctctaatccccagtcgtttggggaacttgggcgtcttccaggggacccagtggtgctgatgggatttctgggcacctcagccaggtcccctgcccacctcgccacactggttcccactgcaatctggctttggggcctgtgtggcctctgcttactgagccctgtggttccctgccaggcaccgttggccctccggccaggctggcacctggagaatggcctgtccccaaatcctgcactcttcccagctcacctgctttgcttttctcccgcactgggaggtgggagccaggttgacactggaggaggagctccctcaactgtggcttcaccttagggttctgggcagggttttgggcagtgagactttctggataggggctggaggtcaacagccttctgagtggggagtggtctcatagcagagagacccacggtggaggggtggggtgggcagggaggacgacccggctgtggaggagctggggcaggcaggttacacggatgcagttcacactccctccttctccccatcctctcccacaccccccgcgtcctctcctgtctcttcctccctgccctgttctgtccctctttcccctctgtgtctccatcttcctgtccctttttccttattcatttgtcctcctcttcactttccatttctccctttccctcctcccctcacctctcatctttctattatgacatatgacacaaatacagactaggacacaccatataaacgtatcttaggtgatgactgtgacgcaaacctcacaatacccctgcagttcaagaaaggtcatggtgagcccctcccggcaccagcctcactgcctagagttgacccctgtcctgagtttgtggtttcttgttgttttagtggacggttttgctacctaaacatcttcacatataataagtgttaattttactcttttacagtttttataaccgtggtcaccatgtgtgtgttctcccatatcttacttttttgttcaagatttttgttggtatcaatccacattgctctctttatggtttaaaagcatcgaccattgtgtactgattctattatcgtgaacagcactacagggagcttttatgtgtggatgtcctggcacacatttacattcacatttgtatgggtttgtgcccatgtgtggaattttagatgataaggcattcatattcttgactgtcttaggtaacaggaaaccttgaaagcagttatacaatgcacacgctcagccacactgtagtatttcctgccactctagatcgccataggctggtatcgtcagtgtcgagtgaaccatctggtaggcaggtgtcaggggcatctcattgggttcccatttgcattttctggtgtaaggaggttgaggcctctttatgtgtttattggtcatttagtgaagtgtgagtagagggcttttttcccgtttatatattgcatgttcatttcttttttccatctctggtcatttgtaggagttttttgtatatatatatatattttttttttggagacagggtttctctctgctgcccaggctggagagcactggcatgatctcagttcactgcagcctcaacctcctgagctcaagtgatctttctgcctcagcctcctgagtatctggtactacaggcgcatgccaccacacgtggcttatttttgcatttttagtagaaatggggtttcgccatgttgtccaggctggtctcgaactcctgagctcaggtgattcacccgcctcgacctcccaatgtgaggagttcttgctatcttctttttttgtttttgagatggaatttcactcttgttgcccaggccggagtggaatggcgtgatctcggctcactgcaacttctgcctcctgggttcaagctattctcctgcctcagcttcccgagtcgctgggattacaagcacccaccaccaggcccagctaaattttgtatttttagtagaggtagggtttcaccatgttggccagggtggtgttgaactcctaacctcaggtgatccacgcgcctcagccttccaaagtgctgggattacaggcgtgagccaccactcccggccagtattttcttgataagagcccttgtttggttatttatttaaaatgccttctgcaacactggggattattagctttgtattcccttgacggtttttattgaacagaagtataaggcttactgtaatgaaatttatcaacgcttcctttctgcttgatgttgtgtgtgtgtgttttgcttaataaatagtcttatctttttatttttatttcttaatgtggttttattgctttggaaaaaagattctcatctcatggtcataaagatattcttctacataaatacttgtgaagtctttattcttttgccttgtccattgaggtctctaaggtacatggaattgacttttgtgtgaaatgtgggtaacagtcctcttacttttaaattatatagattccctgctgtcccagtactgtttaggacaggagtgtgtaatgttttggcttccctgggccacactggaagaaggattgttttgggtcacacataaaatacactaacactaacaatacctaatgaactaaaaaaacttaaaatcgcaaaaatctcataatgttttaagaaagtttacaaatttgtgttgggccgcattgaaagccaccctgggccgcaagcatcctgcgggctgcagattggacaaatttggttttggagaagatggcccttattccattattctcaatgtccctttgtcaaaaagcaagtgccccatagagggacatagtttgcttctgagttctctatttcatgtcgctggtctgtttgtctgtatgccaatgtggcactatgttgagtacacactaaagctttagttcttgactctggcagagggggtccttccgctttggccttgttcctggagtgtctttgctgtttttgaccctctgcggtgccagacgtttagaaacagctatttgaattcaatgtgggagagaactgaagttttgatgacatcgagtattcctctccataatgctgggatatgttgccgtttattttgattctccctattttctctcaataattttttacatatatatttctatggtgctcttatacatgtattaattgattgattccaaggcatctgttctttttaatgccattgtaaatgttacattcttttaaagtgtaggtttataaatgtttgtgttgctatatagaaaattttaattattctatattattttgtatttaggattcgaagactctttagtattttctctgtagattctttaagattatttatataaatatatcaacgtgtatttgtttcttcctcttcaatattcatatattttacttgtcttgctttattgcatttgtagaatctctagtgcaatgttggatagcaatggtgaaaacaggctttttgtttagtatctaaactcaagaggaacttttttgtttgttttgctcttgacagcattgtattttatataaattgttaaatttcacgtaattttaggcttataagaaagttacacaacattatatataaatatttctggatacccttcatccagattcaagaggatagcttttgatattttatcattaaataggaagtttaacgtaagatatttttggtagatgttctttgctagattaaagatatatcattctatttctattttttaaggggatttttaaatcttttttgagacagggtcttgctttgtcacctgggttggagtgcagtggtgtggtcttggctcactgcagcctcaacttcctggactcctcccacctcagcctcccaagtagctgggactacaggtgggtgccaccacacctggctaatttttgtaatttttttagagacagagttttaccctgttgcccaatgtggtctcaaactactggctcaagtgatctgcccaccttggcctcctaacatgctgcaatgacaggtatgagccactgcatcctgcgtcagataattttttaaatcgagaaaagatgaatgttatagcacatctcacttgcatttaatgaactgtgtgtacagtttttttccccttagttctgtgaaagtgttacatcaaataattttctaatttgaaagctaccttgcatttctggtgtaaatcctcctttatcagcatacactattcttaaatgtaatttattccactttgccaataccttgcatggtacattttgtctatgtccttgagtggttaaattttggtgtcaggatgataccagctcattatgaattggggatgtagtggtaatttctatttattccaacagatctagtcttcttctttccccagtctgctttgtaccccagaacatggccttttgtggactgcatcattgggctacattgccctttggtttttgtgggtcaacacattggagatatagcagggcactgaaggaaagaggagagtgagatgaggggactcactcccagttgccctccttcaggactacaggttggccatggctgcgttcctatcctggtggccgaaggtcctgggagctcgctctctcctacagttacaggtctcactggattgtagcaaagcttcttttccttgcctcccattagatattttgctcttgcttgccttgggcattttgttattggtttccctttactttgctcacagcagagccataagcctgtgaacccaggggtgtctgagacaggtctcaatcaatttgaaagtttattttgccaaggctagggatgtgtctatgacacagcttcaggaggtcctgaggacatgtgcccaaggtggtcaggatacagcttgcttccatacattttagggagacataatacatcaatcaatgcatgtaagatttacattgcttcgatctggaagagcagaacaacttgaagtggggatgggggggcttccaggtagtaggtagatttaaaaattttctgattggcagttggttcaaagagtgaaccaatagaaaagaatgtctgggttgtgataagggattgtggagaccaaggtttttatcatgcagatgaagcctccaggtagcaggcttcagagagaatagattgtaaatatttcttatcagacttaaggtctgtgttgatgttaaatcctggtcagcttttcctgaattccaaaagagagataggtataatgaggcatatctgacccctccttccattatgacctgaactagttttttaggttaactttgaatgcccttggtcaagagaagggttccattcagatagttgcgggccttagaattttattttttgtttatagtcattcattaaactcttgtcatgtatcctgtgtgagtgtgccatttccttcctgcagggacattgagtggtacagggaatgcaccctcattatttatgctttggaagaatttgtataagattggagtggtgtaagcgcccgacgggttcttcccgcctgctccacaaacaaaatcaattcacagagaccataacattgcagtaaagaaagagtttaattgatgggaggctggccatgccatgtaggagacagagttatcatcaaaatgatctcattgaaggctcagaagctatgggattttcaaagatgcttggtgggcaggggacttggttatatggagtggtgagggcttgggttgaagacgaaagaatagggagtcaaagctgtctttttgcatggagtcacttctggatggggccacaggagtggctaatggatccaggtggagccatcagtgttagacacacaaagaaaacctgaaaagacatctccaaaagccaatctcaggttctaccatagtgatggtatctgcagaagtaactggggaagttgcatatctgtgaaatccagaataattggtggcaattatttcatatgtttattaaagttgttattttgttttaatagctttattgaagtatagttgacatataacaattacatatacctaaagtgtatagtttataatttttgtttatgtctataccttggccaaattaagagggaccatcaggcactatcctcctagcttgatggtctctcattagctttataaacacagttgagttttggggaagggctattatcattttaattataaagtaaatgtctctttttaatgttcttctcttcattaatctattaagttgattctaattgtactttaaaatcttgtatgtttattaaattaaattattttgttttaatatcttttaataaagtataattgacatataacaaatatgtatatctgaagtacataatttgtgacttttgacagttgcaaaaatcagaaccaccataatgatcaaaataatgaacacatccctcacttccaaatgcctccttgttcctctgtgtaacaccctctcctgcatctccttaatcccttcctcctctctaggcaaccgctgatcagctttatgtcagtatagattaatttgcttcatgtaaattcaatcatacagtatggaatgttattatttcttcagagagtgttgtccttctggttcatctgtgtcatgtgtatgaatagtttataccttttttgaatgttaaatttaaaaaactacatacggtgatactcactatttttgatgtacgtttatttccatgagttttgacagctgtgccttctgcaggttttgtattgatgtctggaatctcaagcactaccaccacaatagagatgccattttcttactttcaaatattccttgtgctgtgcttttgtagtgaaatattctccttgtcctcaattctgagcagccactggttcattctttattctgataccattgcgttttctagaactgcttatcatgaagtcacgcaatatgtagctttgttgttgttgttgttgttgttctttgagacggagtttcactcttgttgcccagcctggagtgcaatgacgtgctctcggctcaccgcaatctctgcctcccaggttcaagcgattctcctgtctcagcctcccgagtagctgggattacaggcatgtgctaccatgtctggctaattttttgtatttttagtcgagatggggttctccatgttggtcaggctggtctggaactcgtgacctcagatgatccacctgcctcggcctcccaaagtgttgggattacaggtgtgagccaccacacccggcaatatgtagtttttttgagtctcgcatcttttaataatttgatcatttacaaattctaattatgatcttacatttttaaaggtatcaagtgtcattacactttcttgatttctttcttttctagtttattgttgatgttcaggaatggtactgattttagtatgttgattttatatcctgcacctttaatgaatttattgatcagttctgagagttttttggtggtgcttttggggttttctgttcataagatcatgtcctctgcaagcagagacaatttgacatcctcctttccagtctggatgccctttgtttctttttcttgcctaattgctctggctaggactttcattactacattgaataaaagtggcaaaaatggacattcttgccttgttccagatcttggaggaacagctttgtacttttccctattcactatgatgtgaataggctgtgggcttgccatacatcgatttattgtgttgggctacattccttctatactcagtttgttaagagtttttaccatgaaggactgttgaattttatcgtgctttttctgcacctatcgagatgttcatatggttcttgtactcattctgttgatgtgatgtgtcttatttgtggatctgtgtgtcaggaaccatccttgcatccctgggttgaattccacttggcataggaatgatcactttgatgtgctgcttcatttgtttggccagtattttggggaggatgtttgcatccacgtttatcagtgatattggcctatagttttctttgttgttgtgtccttccctgagtttgatatccggataatggtggccttgtaaactgaatttggaagaattctatactcttcaattttctggaagagtttgagaagaattgctattaattcctcctaaatatttggcggaattctgcagtgaagccattggagtctggaattttctttgataggagacattttattacagattcaatttgtcacttgtaattggtctgttcaaaagtttgatttcttttcagttcaatcttggaaggttgtatttttccaggaatttatacatttctgctaggttttcaaattggtggttgtattgttgttcatgacagcctctaatgagagaaaatctaatcatgaaaattcacccctagctgaggcccacttccttcctcagtgatgtggccgtcacccaggccacaggtccgcataccagtgtgagtcaggccgggccaggtgggcgggaggcttggccgagtggcaccaggaaatgcttcttattgctattgactcggcttgaagatccctaacctgcataggtttttggaattaaaacagaaaggtaaatgtcaggcctggtgagtttccagacctctggcatgctcagccccagggcttgccaccccacaggggtcggatgctccatctcccgctccagtccctctctcactagactttctgctgatgtcctgtgcactcaaccaacatgacccagtgtctagtgaagtcacgcagagcccatgcaggagacacacagggcattggtgacttggtcacactcctcagggcacatatggggtgaccgatggatggaggagaaggaaatgggggtgctaagagttcactcttgacttggagaaggagacctggagaaggtcaagtgttggaaccaccctggcagaggtcagagacaaaaagaaacctgagagatggggcccagcaaagtggaaagctggggtgtacagagggagggtggaggatcaggtctcaaggtcagcaggctgggtcctgcctattgtgtgttctggcactgggtatggactctgtgctgagagatatgggtaggtgtctggggtgtgtggtgacgtgatgagacctggactgtaagaggtcacctctgcattctgggcaatgacttaggggttggagggaggctatgggaaggtcaacacttagacgtactgcccacctaagactggagtgaccttgtgaggtggctctgaagggtgtgggaggctgacttcaggcaggagaggtaaatgggactgagctaaagggaggtgtggggagcactggtcagggcagagaggatggctcaacggcctgtcttctaccagggagtggctcagagccagggcaggaggccagctctgagttggtgggagcctggcagaggttttgctcaggagtcctgggaggcccctggacctgagtgacaggtctgaggggtctcacttgcacttaaggcattaaaatgtccctgtgccttttgtatcctattagtaggtcaaggaacccagcagcaaggtggacttaggcctccaggggctctggctgtcatgggtgaggggagatgaacagagttggaggctgcagggaggagtggagggggagctggcaggatgggccagggttccccacacaggctcagtggagaagggcttgtcatcatggtgaccctttgtgctgcagcctagggggtgagacctacagtcatggaccagatcccagggcagtgtggatgatggaggaggagggtgagttcaaggcaggtgtggggacagaagatgtgggcctccaatgacctgcacagggcctgcattttatcctgaggaaggaggatcaggagcccccgagggcttttcctggagccgcaggtgctgccatggagtgcagggaaggtcactctggcagctgtggggatggcctggagcccagggagttggtcctagaggaaggaggcagctgccataatccaggtcagagtcaacaaggacataaaaccacctgctcattgtttactcatttcttcatcacaagttctctgagtatgtccttggatccaaggcctgggaaaccaggaatgtgggtatgaccccatttcaaccttgagaatggctttgaagcctattgtccctagaccacacctgaggatgttacctggcccacttttctcacattacacaggagaggactgaagacagaaggggtatggtttccacctccaaggtcctgcacagcccaaggacacagggcctggaggaggtcccaggtgtcctcatgtcgtgacctgacctctctcaaatggaacatggatctcagctatgattctattttccatccatccatgcactcatcatccatccatccatccatccatccgttcatccatccatccattcatccattcatccatccatccatcatctatccatagatgcatctatccacctatccatccaacaatccatctgtccagctatccatctatccttccattcttttatctgtttcagagacagcacttcctacatttgggcagcaagactcttgttgaagaggatgtggatgaggcatttctgtgggtgccggagaagctccatatagtgctaggttaatattactaagttatggctgaaattcaatattctatgaaacatacaagtagggaatataattccttataccaacaatacagagatcatcacatatcattaagaataacagagtcgtaagcattttagttaaagtaaactcacaggacattgtcattttaagaaattactcaatttcaggacaactgacagatcatgggtagactcatcttcagtgacaattattttctaacattttccttattctttcaaacacatgtgaaatgcttttgcatctcaaagtatttatatcaataacatgtttgtccaaatttctcagggcatttctaattcttttcatttacttctggttgaaactctccatctttgattgctacaagctgagttttaattgagactgaataagtagcatgatctgcattattttctttagctccacagatttaaattccattgaaatgctgaaatttacatgtttttgtctccaggcccaactattccatgagctccaaactagagcgtctcacaccccctgtgtcccgtcctcctggatagctaatggatgtcttggatgtgggaaacttatccaggccagcatgggactctggatctttgccctaaacctgctcctccccaggcttcaccttctcagcagtggcatcacatccagccagctgctccagcccaaatgtgatgagatcattttgattccccttctctccacatcctctccccatattcaattcaacagcaggtgctgtcagtgctgccccagcctctgtctccctcgtgtctctccagggctgcactgtgacaaggccacggtgtctacctggacggccacagggactcccagttggtcttcctgcctctactgccgcccccgttgctctattccaacagggaaagtgtgacctcgtaagtcctgctcatcccctcccaggatttttcactgcacatggaaaggatccacctttctgcaaggtcctgcgtgacctggcacttgcctcgttttctgacgtgacctccttccctgctgccccttgttccagctgcactggccatttctccaacacaacaaatcctttctcatcatgccgcattccctgccccagaccttcacctggtggctgcctcaggttcttcaggactcaggggagatgttgtctcctcagatgccttctgggaccacctgaccaatgtggcacctcaagccagtcccgcctgatcacatttccctgttgggtggtccttgtggttctcatcactattacaattttcttgagctttgcaaccccctcttcaccttggatgtgaacttcagggaagcagggccgtcacctgccttgttttccactgggtgcccggctctgggaaagggcctgatgtgtggcaggggacacttcttccctggctgagtggatgggtgatgactgggatggaaagtgcattaaatgaggccaattctggggacagaggggagatgatgtgtcctgagatgggggactgaaacgtgtgacctggaggagatgacggctgagggatgacaaggagaatgggtggaagggagaaagggcattttgggcagtgggagtgagggaggagaagaatgttgaaaggaaatctgggagtgcaaagatagggtggtcagcagtggagccttgtcctggccagccgtgtgtgccctgctgaaggtgggtctgcacttgtagggaaatgagctctcaaagatccagggagaaagaagatccaggctggtattcccatggaaggggagtgaggctggaggcagggagactcagagggatggaggtctcgctgacctgagcaggagggagggacagggtttggagggtgtcatctgagagacacctgggtgggagggagagggaggagtctagggcggtgtgagctgataggggtaggcgaccaccgcctgggaggtccaaggagcctgcggaaagggcttgaggtttggggagggacctcccccagaaggagttgatggagcctcatcagtgtattgaaggccactgagacctccatcgaggatgaaatcaactgaggggtgaggtgggagagaggggccgtgtttgagggtggcactcgttccctgtgacctcaatgtcaatgtcccctgtcatggtgacatggccacacagacccatggcctcatgcagattgcctggtcccaccagccccaggagcagagctgagctgcaggtatttatggggacgctgaggcttgtgacttagccaggagggtgtgatttcccagcctccagcatcccgagtcctggggagccctggaggttctgcattgaggggttgtggggtagaggtagggggagaaaaaaggacagcttgggtaggtagggatggagaagtgtgttaaggttgatttcctgggttccgaaaacaggcatatcgactggacacagtggctcatgcctctaaccctagcacgttggaggttgaggtaggtggatcatttgcggtcaggagtttgagaccagcctggccaacatggcaaaaccctgtctccactaaaaatacaaaaattagccaagcgtggtggtgtgtggctgtattctgctactcaggaggcagaggcaggagaatcgcttgaacccagaaggtggaggctgcagtgagccaagatcgcgccaatgcactccagccaccctcctccccgccaaaaagaaaacaggcatgtctatgctacacctgtagagtttttcctcagtcgcatattttcacactgggaccctggtcacactctgcatatgcggtcacagccaaccccacacagatgccagaacacagaactgagctgcaggtgttcattggggtctctgtagtgatgaacagagccaggccaggaacgcggggagccccaaggaaggcaggagggccaatatctgatctgcaggggtcctcagatcagaaggctgcttctatgcaatcgttgctctgaaggatcttcttctgttggaaaaagaagaaagagaggagccggtggcctctgtgaaaggctccccagactcatcgttattgcccggtccccgagctcagaggagctccttgagtgtgtctgcttgttggggatcccaggctctggacaaagatggtggatgtgggttgtgtctcctgcttgagtgtgactctgcatgtgttggtgtaacacgtgtatgcatgtgtgtgggcaggcatggggtgtgtgtgttgctgttaacagcgtcctgtgtgagtgtgtgttgctgtgtactcatcatcagtgctttggtgcagtgattgtggttccctgcatgcctaggcctctcccgggcaccaggggcagaggttctccccttgcagagttgcagcgtctgggtcgaggacttggagaggtgaggcaggagggccctgttggggcaggtggggaacttcatctgattttgcgcatcctgggatgtggcttcctgcttaaaacgtggaaagcaggatggaaggcaagtgcagggaagtgcaagcctgggacgtgtggccatgtagtgtgtgcaggtccccccgggcacactcacaataacaactgaatgagcaaatctttctgtcacggagacattggcaaagcattgctggacattgaggaaggactcctctgtcaggggactggggttgtaacgagcaagctcctccttcaggaggtcttgggacacatcaaacacaacattcgcaagcagtttatcgatatccaggcaggcatcccctgtggaggatgaggtgagataagaaaacagaggaggtcagaattcagcgaaacctcccatggccaatgagaccttgggatggtgatgagagtgaaggagcagggccaccgcttcctcccagccctgctcgcctctttcttacccagctggacgctgcagatcagagccagcagaagagcacaggtggcggatgtcaccctcatgacagcggagtctggtcccagcaggcacaggcagggaatttggcgatgggtgagctttatgtatatctgaacaaggcacatgcctcttcgtgtgtgtgtgtgtgtgtgtgtgtgtgtgtgtgtgtgtgtgtgtgtgtgtgaatgtggtcagggcaggtctgcagagagaccctcggccctgggccatgctgttggggtggcagcgtatcgggaactggactcagcatgcagtgggaggggttgggtgttgtgacattctctctgtcctccctggagctccctgggattgggagcaggctgaacactggtgtaagcctgcaagtctgagtgtgcatgcacatgtgaccctgtgtcttggcaaacgtgtgtctgcacttggcacgccctagcacagaatctgccactgagtgctggctcaacaaacatttgctaagtgagtatgtctgtctgaatggatagcacattaggtgcagcttttgagaaatcagtaaactgtaatttagattcaaagaacattatctggagtaaaacacagaacctaaaggacatgagatgtagcaagtgtgttagggacacatgtgacacagtgaagggatcctacatgttggggaccagcctcaacactacccgtagggtacccgaagtctggtggtgacaaaggattgagaaaagacaagttaagagtgaaaggtggggagccagggggccagtgcaaaatgtggaggctgcaaaaggtgccgagctctggtctccacactatttattgagtacagtcccttcgatctaagaagcagatgttcagggagaaacagtgaaagggtggcagtgcatcacaggcataatctatagcaatagcagtttaaatgagtctcctttgtgctcaaacagcataactttaacttgttggagagtagctagtaggagcggccttgactgggagcctgcacgtctgtccacattccagtgtttcaaagaagtgtctttctccctgagcacagtgtttacagagaagacagcgggtcttgctctgagcatgggaacatgatggcaattaggaggctttcctcctcagaggccttttgtggctttccacaacttattcccgtatttttatggccagtttatacaggcaccccacaagcccttttcccagcacctacatatgagggagctgatgtcactcacgtgatttttgtctcctgacaggaccctaaattgtaagtgtgaccccaggggcagaatcagcaggtggggacagctgggggtggggaaggcagcagggatgctgacgcttgtacactcgggtgccagtgccgctccaatagcggtttgtgccctactgtgtcaagggagggtctggctaggagcacctgagggacacgcccggtgcagaggacactcactgggctgctgagagccatgtagaaccgcagagcagttcctagattaggctgtgccacccagactgagtgggctcacctcggccaggcatgagccatcactgtgcacgtacagaacctcatagtagcgcccaggacttgggcctcttaaaggacctacccagcattgggtaggacttagagtggccgtcaccagtggcagggccctgaacgcccccacattccagttgtaaagttgagtggatgagttgacagttggactggcagacgctgaagcaggggctgtggctgagcagggaggatggaggccactgccactccctggccggccacctgctgtgtcgtccctgccacctgtggtcctgcagcctgggctgcaacctgcgcagtgcaggcgtccatgcgtgctgagactctcagccggctctgtggcctgtcatgttgtgtgtgcgggacgaggcttgggtgcacgtgtgtgagaatgggattttgtgtgtgtgtgagtggaatgcgctggcaggattccacccactatgtggggtggagggtctgtgattatatgaatatgaggttgtgattgtggctgggaggggctgtgtggctgcctctgcctctgcatctgggtctgtgtctgagaaagaaagggagagatgggggaggcctggtgtggggacccagcagggcagggacaggggatgtttcctcactttacaccatttggggaccctccccagggggaaaagccaggtacagtggagaagcactgtctgagtgggcttcgtcctggggacagaggctgggagactgcagctgaaaggtgtgggctccaagagggccgcagtggggctgagcagcagagtcagggaatagaggacctgggagcagagggccgccctccctccatcttccttccctctctggaccccagagcactgtgtcccgtctcaacccccacagctgcaagtggagccagctggaggggtctctagagggaggggggtcctctgagggtagagagggccaggaggcttcctgaggacctgaggcccctctgggcctcccagggcttggagcatgtccctcccagtggctgatctgcattgccctgggagggacatgctcagtgatggggtttgtgcagctgtcactcaatcacctgcctgtgcccagccactcacctgtgactcccatcagccccaccacatgtgggtcctcaagtgccatgagaggaagttcctgcctgtgtcacatgcatccatcccacccaccacactgcaggttacaggactgccccacaagagccaccatgcccacctgaggttacctggcacacaggtatcctcacctgcatgacatgaccagatcgtgcactttctatgccagggccagggcaagcttgcacttttagccctggggacattgggggtggtggtggctggaggccagggaagtcaccaggctggagacatcatctacctccctagagggtttgatatcagacatctcccgtgcaccactttcagccatctcagcctcacctgggactctggctggcactgggaccagcagttccatgaaggtttagaccatctctaggcttaggaagtgcctcccttgtcatcactgtggtctgggctatgcgccttgtgaccaagggctctgggcagcagatgcagccagccagagggtgtgggtgaggggcctgggcacaggagggacgcgaggccttccctgcaccctcatggccaccgtttcagagggaagacaacaattatttggttttgccctgtgagcagcagcagagagcggggcccagggcaggtccagggccagacaggcatcccatgctgcagcctcgaggcctgcagggcacatgatggggccggtgtgggggcgtctcttgtgccaaacaactgggcaggaggtgccctggggctggtgggtgggtcagggcgttttcaagagccatgttaggatagagagtcctggagaatggagtgagggggcagagggggcagagaatggaggggtcggggagactgctcccactgctttctggcttctaagtgggggtgatgggtggtaggtgagtggcagaggggtcagcgggggctgcaagactgagccagggaagtggaggcagcaagaatgcaggccttgcctgaggctgactcggggctaggaattctcagaggtcagggccctagagctcccggacagggagtttgcaggaacagtgacgcagcacatgccacggcacaacttgacacaacacaacatggcacagcagagcagtgtgcggcacactgggctgcagcagagcgtggaatggggtctgtagggtctagggaattatggagcaaaccgacctgagccgtgtccctcagccaaggcacaggcactggccttgagccacccacttccttgtgacagcctcatgccctggcgtccttggggctgaggatagggctggggctgctgtccaaggtgaggtcactagaggggactctaatccccagttgtttgaggaacttgggcatcctgcagaggatttttggacacctcagccaggcttttggggtggtggggtctggacccagggggaaaaccatggggcatggctttgctgggatagggagggtaggggcaagagtgcagctgggtgtggccctgtaggcacagcatgtggcatctgccagtccccatttcctgccttgcttccagcctgtgctgtgatgcaggaatcacttccttgtgacaggtccgtgccctggcctctctgtggctgagacagggctggggctggtgtctaagatgaagtgtgactctaatcccctgcttctgatccccagttgtttggggaacttgagcatcttccagggacccagtggtgtagatgggactcctgggctgtttagtcaggcctcttgcccacgtggccacattggctcccactcaaatctggccttggggcctgcttggcctctgcttaccaagtcctgtggttctctgccaggcaccattggccctgcggccaggctggcacctggagaatggcctgcccccaaatcctgcactcctcccagctcacctgctttgcttttctcctgcactgggaattgggagctaggttgatactgggagaggagctccctcaactgtaggttcaccttagagttctgggacaggtttttgagagatgaggctttctagaagggcctggagctggtgagcctgctgagcagggagtagtcccacagcagagggatctatggtggaggagtgggatgggtggggaggacgacccagctgtggaggagttggggcaggcaggtcacatgggtgcagctcgccctttctccttctccccatctgtattagtctcttttcatgctgccaataaagacatacttgagactctgcagtttacaaaagaaagaggtttattggacttaaagttccacgtggctggggaggcctcacaatcacggtggaaggtgaaaggcatatctcacatggcggcagcaagagacagaatgagagccaagcaagacaggtttccccttatcaaaccatcagatctcgtgagacttattcactaccatgagaacagtgtggggaaaatccctcatgaatcaatgatctctcactaggtgcctcccacacatgtgggaattataggcatacaattcaagatgagatttgggtggggacacggagccaaaccatatcaccatcctctcttccctccctgtcctctcctgtcttttcctccccgccctgttctctccctcttccccctgttcctcagtcttcctgcctctcttcttccttctccatttctccccttcttcacttcccatttctccctttccctcctcccctgacctctaatcatctttttattgtgacatagaacacaagtatggagacgtacacaccatgtaaagtgtatcttaagtgattactgtaatgcaaacctcacaatgcgccctccagttcaagaaagatcattgtgagcccctcaaggcaccagcctcacctcctagagtagaccactgtcctgattttatggtttttttttattatactttgttttagggtacatgtacacaacgtgcaggtttgttacatatgtgccatgttggtgtgctgcacccattaacttgttgtttcagtggatggtttttctacctaaacatcttcatatacagtaaacgttaattttgctcttttacaatttatatggctgggatcgtaatgtgtctgttctcccgtatcttacttttttgttccccattgttgttgatattcatccatgttgttatctccattgtttaagtctaccctggtacactgattctattatcatgaacaacactgtagggagctttcatatgttgatgtcttgtacacgtttatattcacatttgttggggtttgtgcccatgtgtggaattttaggtgataaggcattcatattcttgactatcctaggaaacaggaaaccttgaaagcagttgtacaatgcacttccccagccacactgtagtatttcctgctgctctagattgccacaatctggtatcgtcagtgttgtgtgaaccatctggtaggtaggtgtcaggggcatctcactgtggtttccatttgcattttctggtgtaatgaggttgaggcctcttcatgtgtttattcgtcatttagtgaaatgtgaatggaatctttcttcccatttatatattgcatgttcttttctattttttccacctctgactgatttgtaggcgttctttctatattcttggtaagagcccttgtttggttagttgttgaaaatgtcttccccaacaccactgtggattagctttgtatgttttaatgattttaataaaaagaagtttaaagtttactataattaaatttatcaatgctatatttctgctcggggtgtggtgtgtgtgtgtgtgtgtgtgtgcattttgtttatgtaaacattcttatctcatggtcataaagatattcttttacataaagagttgtaaagtctttattattttgctttgtccattgaggtctataatccacatggaatggactttgtgtaaggtgtgggtaagagtccaatacctttttaattatttagatatcctgttgtcccagtaccatttaggagaagataatctttattctactgctctgtgtcctctttgtcaaaaatcaagtgcaccatagagggccgtagtttgcttctgagttctctattttgtctcactagtctgtttgtctgtctctatgccaatgtggcactgtgttgactacacactaaagctttagttcttgactctggtagagggagtccttccactttggccttgttcctagagtgtctttgctggttttggccctctgcattcccatataagtttagaaacagcttgttgaattcaatttggagagaactgaaattttgataatattgagtattcctctccataaagctggtacatgttgccatttattttggtcttccctattttctctcaataatttttacctatgtatctctgtaccactcatatgaatgtattaatttatttattccagggcacctgctattttaatgccattgtagatgttatcttctcttaaagtgtacatttatacatgtaagtgctgttgtataggaaattttaattattctatattgttttgtattcagcatttaaaaaaacttttaatattttatctgtagatgctctaagactatatataactctatctaatgcctatttgtttattcctcttcaatcctcagatttttacttgtcttgctttattgcattgtagaatctctaacacagtgttgggtaacaatggtgaaagtaggcttttttgtttagtatctgaacccaaggggaagggtttcttgtttgtttgtgttttgttcttgacagctttttattttataataatttttaaattttggcacagtttcaggcttatgaaaagctacaaaaattttaaaaagtatttctggatacccttcatccagattcaaaaggatagcttttgatatttcaccattacataggaagtttactgtaggatacttttggtagacactctttgttagattaaggatatattattttatttctgtcttctaagagcatttttttaaaaaaggaaagatgatgaattttagaacacatcttatttacatttaataaaatgtgcatatagttttttcttagttctgttaatgtgtccaagtatatcagatgatttttcaatgtgaaacctggcttgcatttctgggataaatctgccttaattggtatcattattctttttatatataatctcattgactttgctaatatattgtgtggaacattttgtctatgtccttgagtggttggattttggtgtcaggattataccagcctcattaaatgaatcaggggatgcagtggcggtttccacttattctaagagatctagtctaccctttccccaacctgctccataccccagaacatggccttttctggattgcatcattcggctacgttgccctttgtttttttgtgggttgatatattggagataaggcgggaaatgaaaaggaagaggagggtgagatgaagtaattcactcccagctgacttcccttagggctacaggttgacagtagctgcacccctctactgatggtcaaaggtcccgtgtgcttgacctttcctgcagttactggtctcagttcattgtagtaatagctccttttccttatctccctttagatatttcgcttttgctagccttgggtgttttcttattggcttcttttaactttgctcaccccacagccaagagccattcattaaactctcctcaggtgtcccatgtgagtttgccatttctttcctgcagggacactgatggatacagagaatgaaccatcattttttattgtttggaagaatttgtgtaaggttagagtggtttcctcattaagtatttgccagaactttccagaaaagctatctgcatgggattttctttgcaaaatctttaaaaattttaatttaattttacagataattagaggactgcatggccaccagcaacagttgcagattcttctgggtaataaaactcacaggcacaatagatgttcacctgactctaaattaacttagatttatgaaaggacaaagaaaaagcatgttcagcattttcagtgttattggtggggtgagagatgtccagcagcagcagtctaacatttcacaccaccattcaggaggatagttatttgggaattgaaattaatgtgcatgaggctcaccttggcatgttcatgtatcactgtctgatccagaatatcttacaacactggaggacagctccatgtccatgttaattcaggaaagtcattgccttgctttcctgacagtcttttacatggtcctaatcatgtcttcattcaatgtccatacaccactcactgccctcccaattcaggtgcaatcccccaagcaaagctttcacaataaacaatgcctgaaatgcagcatttctcattgatctaagtccattctaaggaggcagtgctggaggaaaatgagagcaatgtcattgttccaggattaattatagggagagagcctaggcctgctgttcacagtttgcccataaggactatgcaggatttctctttcttctcatgtcagtatttgaatatttttcttggaatttaaacacttcacctaatttaaaatacagacaaagtttccataatatcttattttttaatgttttattactttttttttttttttttaacagataacgtctcactatattgcccaggctggagtgcaggggctattcacaggtgagatgatagctcactgtagcctcaaactcctgggctcaagcaatgctcccacctcaatctactgaatatactcttattttatatggctgaagggtcttagggagatctccttttaaataatttattcattatttgtgtctttcccatttttctttttaatgtctccctttaggtaagtttgtcagttgttagcagattaatttaatgttcaagaatatttactttgtgctgctatattgccagacagtcttttacatgatcctaatcatgtcatcattcagtgtccatacatcactcactgccctcccagttcaggtgcagttccccatttcccctcactccattgatatcaggctcaggatgtccctagatttggacaatgggatgttagcagacaatagggagttaattgcttcaataggaccatgcagttagtctttccttcccacatccctgtggtcactatgagattaccttttccttagtaagtgatggttctttagggtgagcccctgaatgaatagatgttgatcagatttgagcccaacctacaggagtggccaagtcctaccaggcccacagcttgagtgctcaccatctagccgagcccagcttatatcagctgaaacaccagccaaactacagcacatgagtgatcatcaatgattgtcattttaatctattgaattttcaggttgtttgtgacacagtaaaagtgggccaattgaatccttactttctatagatatgaagagtttgtaatcttttattgatttttatgaaaattgcattgagatcaaattatatcctctattttaaaatcctttgaaatttgttgagatctactttatactctaatacatggtcaattttttaaatgatccccatgcagttaaaaagtgcatattcctccattattacatgccttattctattaagttgttcctaattgtatttttatatcttgtatatttttatttttattataacagctttaatgaagtataaatgacatataagaagcatgtatatctaaaatgtacaacttgtaacttttgacagttgtgaaaaaccagaaaattaccaccacaatcaaaatatgaacagattcatctcttatgaaagtttccttgtacctctttaagtgcctgtctcctgcctctttgtccccttccttctttctaggcaaccactgatgtgctttctgtcagtatagattagtttgcattttctagcacttcatgtacatggaatcatacaacatgcactatttttggtctgagttccttcacagatcttataatcttttggcttcattggtcttgtgtgtatcaatacttcatagctttttgagtcttaaatgttaaaaaatttacatgcagcaaactcaatctttttgatgtggatttccatgagttttgagaactctgtcttatgtaggttttgtatggatggctggagtcataggcacttccactacagtagagatgttgcttcctaacttcagatactccttgtgctgtgcttttgtagtcagatggtctccttgcccttaatcctgagtggccaccagcttgttcttcattccggtggctttgccttttccagaactgcttatcaatgaaatcatgtaagatgtaactttttgagtctggcttctttcaataattttctcattgacaaattctacctacgatcttaaaattttatttattcatttattttttgagacggagttttgctcttgttgcccaggctgccaggctggagtgcaatggtgtgatcttggctcaccgcaacctccaccttccaggttcaagcaattctcctgcctcagcctcctgagtagctgggaatacaggcatgcaccaccatgtctggctaatttttttttgtatttttttagtagacacggggttcctccatgttggtcaggctggtctcgaactcctgtcctcaggtgatccacccacctcagcctccgaaactgctgggattacaggcgtgagccactgcacccggctaatcttaaaattttaaaggtatcaatgtatctttattaatattcattttttcagatgttttaattactggaaataagattacccaatttgtttttttagaaatctggttcttctgtgtcaatatatttaatgtatttttacgtagttactaaaattttttttttattttacgtagtttttaaaattttttaaaaaaattttatgtagttttttaaaattttaccaactttttaaaaaattttacatagttactaaaaatttgtttttaattatgccagctttattggcataattgacaaataggaattgtgtatatttaaaatgtacagctttaacatatatatttacagtgtgaagtgaccaccatactcaaggtacctgacatatccatcatagatttaagatcatatttagaatttataaaaaggtattgaagtcagccagactcaaaggctacatcttgcatgatttcatttattagcaattctggaaaaggcaaagctatagggatgaagagcacaccagtgcctactaatgattaagggtggggagattatttgagtaaaaagggagagcagaagaaactttttgaggggtaggaaacaggtttttcttttctttttctttttttttttgctggtgaggacacttacttaagatataaatttttatcaaatttcaagtacaacagcttctccctttttcagttttgctttctgcagtttcagttactcgtggtcaactagggtccaaaaattggtgaggcagtacaataagaattttcagagacagacaatgaccagatttatataacttttattacagtatattggtataattgtcctattttataattagtacctgttaatctctcactcagttaatttataaattaaactttatgataggtatggatgcattgtaaaaaaaaaaaagcatagtatattgtacacaaggttcagtactatgcataggttcaggctttcacgggggattgtggaatgtatcccctgcagataaaggcggactcctctctacaatagagtattattaatcgtggccaccacgctgtccattagatcttcagagctcacttaccttgcatagctgaaactctgtaccctttgaccaacaacttctcactcattcatcccccggctacactttgccccaggcaaccaccattctactctctaattctgtgagttcagtcattttagattctacatagaagtgaggtcatgcaggatttgtgtttctgtgtctagcctatttcactaggcataatgtcctacaggttcatccgtattgttgaaaggagcaggatttctctcttttttaaaaggctgaatagtattccattgtatattttataaaacatagaaagatagatggatggatagacagacagatagatagcttttgtgtgtgtgtatatatatcacattttctttatccattcatccattgacaggcatttaggttgtttccctatcttggtgaccatgaataatgcttcaatgaacctaggggtgcctatctattgatgttatttcctttagatatatacccagaagtgggatttctggatcatacggtagctctatttttaagtttttgagaaacctccattttgtttttcataaaggctgtaccattttatatttttaccaatagtgcacaagggttccaatttcttcacatctttgcaaacacttacgatttcttgtcttttggatagaaaccatgctaatgtgtgtaaggtggtatgttgtggttttgattgccatttccctgatgattcgtgatggtgaacatcttttcatgcatctgttggtcatttgtatatctttttaggaaaaatgcctatgcagggcctttgcccatttttaattggattgttttttgcaatgagttctatgaattaattacatattttggatattaatcccttatcaaatatatggtttacaaatattttctctcattttttaggttaatacctccagcttcatcttctcactcagaattcttttggctttttgagcttttttgtgattccataaatattttgggatttttttcctttttctataaaaaatgccattgggattcatggaatctgatagggattggcttgaatctgtagatcactttgggtattatgaatatttcaatattcattctttaaatccatgaaagtatgaagtcattttattcagttgtgtcttaattttcctcatcgtgttttatagttttcagtgtgcaagtattacacctctttggctaagtttattttcaagcattttattctttttgttgttactggaaatgtaattgccttcttattttcttttttggatagttcattatcaatgtatataaatgtctccaacttttgtatgtatattttgtatcctgcaacattactagacttatcagtaatttaacaataaattgttaattatgctcaccctacagtgctatagaaaactagaacttattcctcctatctagttgcactttgtaccattaatcaacctttggctataaacccctctcccaaacttttccttgcctctagtgaccattattgtacactctccttctatgagatgaacttttttagcttcggcagatgagtgagaacatgcagcatttatcttcctgtgcctggcttacttcacataacacaatggctccaagttaatccatgttgatgcaaatgacagaattttataattttttatggctagtgtctcattgcatatatatatatatatatatatataccgtattttcttcatcttttcacttgttgatggacactgaggttgagtcaaatcttggctgtgaatagtgctgcaataaatgagagtgctgcaataaatgagtgtgcagatatgtcttcgatatactaattttctttctttttttcttggatgtatacccagtaatgatattgctcgatcatatggtaattctatttttgtttttttgagaaacctccatatcataatgcctatcctaatttacattcctatcaaccagcaagagttcccatttccttgcttcctcactagcatttgttatcttttgtaattttgataatacccatccctactgaggtgagatgatagctcactgtggttttgatttgcatttccctgatgactggcgatgttgaccatttgaaaaatacctgttgaccatttgtatgtcatcttttgagagatttttattcagctaatatgcccatttatacatcagattatttgtgtgttttttccatgttgagctgtttgagttccttgtatattctggatatgaatcctttgtcagatgaatagtttgctaatattctttcccattctgcaagtcatctcttctctctattgatcatttcctttgctgtgccgaagctttttagtttgttatagtcctgtttattttttctttttttgtttgtgcttttgaggttttctctataaaatctttgccaagaccaatgtcctgaaaatttttcttcatattttcttctagtagtttcatagtttctgctctaagtctttaagctattttaagttgatttaaggaaaaatatgattagagatggatgtctggtttcatatttttggcatattaatatccaattttcccagcaccatttattgaagagactgtccaatcctcagtaaatgttcttggcacctttgttgaaattatgttgatggtaaatatgtggatttatttctgtgttgtctatttagttccattggtctatgtgtctgtttttatgccagtacaatactattttttaaaaaactatagctttatagtctattttgacttcaaaaagtgttatgcctccaacttttttcatttttctcagggttgctttggttatttggagtcttttgtggtttcataccaattttaggactgctttttctacctctgtgaagatgtcgttggtatttttatagagattgcattgactctgcagattgcttttggtaatacgctcatttttacaacattaattcttccaatcatgaacatgagacatcttttcacttttgatgtcttcttcactttctgtcatcaatgttttatagcttttttggtagagatctttcacctctttggttaaatttattcttttttttggtggctattttacatgtgattgacttctcgatttcttcctttactaatttgttgctgatgtgtaggaatgctactgatttttgtatgtcgattttgtatcatgtgcctttactgaattcctttatcagttataagagttttttcttggtccttttagggttttctatatacaagatcatgtcatctgcaagcagagaccatttggcatcctcctatccaggctgtatgctctttatttcattctcttgcctaattgctctggctaggacttccagtactattttgaataaaagtgatgaaagtggccattcttgtcttgctccagattttagaggatgacatttcaacttttctttattcagtatgattttggcgatgggtttgccatatatttattttattatgttggggtacattctttctatacccggtttgttaagagtttctataatgaagcattgttgacttttatcaaatgcattttctgtgtctatttatatgatcttacagttcttgttcttccttctgttgatgtgatgtgtcacaagtattgatttgtatattttcattcacaatccttgtattcctgggagaaatcccacttgatcatggtgaattagcattttgctaagctgttgaggttggtttgctagtattttgttgaggatgtttgtatctatgtttattatggatattggcctatagttttttttttttttctgtatgcgtgtgtccttgtctggtttttctatcaggatatactggttttgcagagtgagtttgaaagaattccattcttttcaatttcttggaagactctgagaagaactggtatcagttctacttaaatattttgtagaattctggaaggaagtcagtggagtctgggttttttctttgatgggagatattttattagagattcaatctcattacttgcaattgctcaattcaggagttctgtttcttttgggttcaatcttggtaaattttatgtgtccaataatttacatattttctggttggttttctaatttgttagcttatagttatttgtagcagtctctaatgatattttgtgtttgtgtgatatcagttgtgatgtctactatttcatttttggttttatttacttgtgccttttttcttgtttcatagttagtctggttaatggtctgttgattatttttatcttttaaacataaccagcttttcattttttgatctcctgttttttagtctcaattttatttacttctgctgtgatccttattatagttttcctcctactaattttgggtttgatttgtatttgttcttctagttccttgaaattcattgttaagttttacttgaaatctttctgtttttttgatgtgagtacttactattaaacttcccagttactgattttgctgtgtcctatagatgttgatatgttgtgttggtttcatctgaactctttctactttttaaatgtaggtatttatcatcaaaatttcttgtttatatagcttctgctgcatcccccaggcttttgtatgttgcatttctattttaatttgtttcaataaattttaaaatttactattttttttttttttgggatgaagtctcgcagtgttgcccaggctggagtgcagtggcacgatcttggctcactgcaacctccgcctcctgggttcaaaggattctcctgcctcagcttccctagtagctgggattacaggtgcctgctaccacacctggctaatttttttttgtatttttagtagagactgggtttcactatattgggctaggctggtcttgaactcctgacctcgtgatccacctgccttggcctcccaaagtgctgggattacaggcatgagccaatgtgcctggcccaaaatttacttcttaatttctttattaactcattgttgaattttcatatatttgtgttttagaaaattcttttttttttttttttttttttttttttttttttttaggatagtctcactctgttgccaggctggagtgcagtagcatgatcttagctcactgcaatatccgcctcctggattcaagtgatttcccctgcctcagcctcccaagtagctgggcctacaggcatgcaccaccacacctggctaattttttgtatttcagtagagaccgggtttcactatgttggccaggatggtcttgatctcctgacatcgtgatccgcccaccttggcctctcaaagtgctgggattacaggcatgagccactgtgcctggctgaaaatttatcttgttattgatttgtagtgttattttattgtacacagaatagatacttgatatgatattggatgcatgcattcaatatgtaataatcacattagggtaaatggaatatctatcacctgaagcatttatcctttgtgttacaaataacccaatcatattcttttcatcatttaaaaatgtagaattaaattattattcactactgtcactctgttgtgctatcaaatactaaaccttattcattcttttttaaatggtcttatgaaaggaatttatattttacagttgttggatgaaatagtctgtaaatgtctgttagatttgtttgatctaacgtgcagcataaatccaacgtttctttgtcaattttctgtgtagatgacctgttcactgctgagagtggggtgttgaagctccccaactgtaattgtattggagtctatctctctccttaaatctaataatattggttttatatttctttgtgttccagtgttgggtgcatatgtatttagaattgtcataccctcttggtatattgattgatcttttaccatttgatcccgtatcacttgagcccttattaatgatcctttgtcatggagtcatttatccttttatcattatgaatgaccttctttgtctcttatagttttatgttaaaatctacattatcagatataagcatactgactcctgattgcttttgattttcatttgtgtggaatattttttccatctcttcattttcttttcttttttttttttttgagatggagtttcactttgttgcccagggtggagtgcagcggtgcattcttggctcactgcaacctccacctcctgggttcaagtgattctcctgccttagcctcctgagcagctgggacaacaggcacatgccaccatgcccagctaatttttgtatattcagtagagatgggtttcaccatgttggcccagctggtctcaaaactcctgacctcaagtgatctgtcccccttggcctcccaaagtgctgggattacaggtgtgagccattgggcctggccatcatctcttcattttcaattggtatatatctttataggtgaagtgagtttcttgtaagcagcatatttttgagtcatttaaaaaatatcaattcagacagtttctatcttttaagtggggaatttagtctgttttcactcagagttattgataagtgaggacatattcttgtgattttgttaactgttttctgagtgttgtgtatatcctttgttgttttcttcctctgtcattgtttgtcattgcactttggtggatttctgtagtgataacctttgattcctttctttttctcctttatgtatctgccccacccataagttttacacttttgtgtgttttcatgatagtgattattatctttttgcctccagatgtagtacttctttgagtatttctttttaagcctgtctgatggtgtttaatgtccttagagtttcttttgtggaaaaaatgttattactctctcatttctgaagcatagctttgctctgtatagtattcttgctggacaagttttttctgtcagcactttgaatatattatcccatactctcctggcctgtaaagtttctgtgaagaaaattgctattggtctactggcaatttctttatatgtgacttgacgcttttgctgtttttagaattctccctccttctttgacttttgataatttgactgtaatgtgccactgggaggaactttcagctgaatcttttttggggccttggatctagatgtccattctctctccagacttgagatttttttgcaattatttcattaagtcagttttctatgccttttctcttctcttttccttctgggacttctgagttccaacatttattcacctagtggtgttgcataagttttataactttttttttcactgtttttcactcttatatcttaatttttctgtaattgggtaattttaagtgacctatatttaagttcagagattctttcttctgctcgatcaagtctgctattgacactgtccattttattttttaaatttcattcattgaattcttcagttgcaggatttctgttttttaattattattcctatcgctattgaatttctgattcatatcataaagtttatctgattttattgaattgtgtctgtattttcttttatcttgtcgagtttccttaagattagtagtttgaattccttttccataggtcatttatttccttttcattgatgtcttttaccagcaagttattatgttcttttggtaatgtcatatttccttgcttttaaatgtttcttttggcacttcagtgttatctgtacatctggtggaacaattgcttctttcaaactttttagagttgctttcataaagtaagactttcccctccagttggatattcttgtgccagttggcaagaaattggtgactgtttccaaattagtatagtggtatggtctacatgtagtttccttatctgtgttgaatgttatcaataactatgagtgaccccatggcctagactgcagatgtttgtgacagtggttgcttaggttgttagcatcattggtcaaggctttgggggccttccaattcttatttttctgctcagcaccacaggggaagggtgtaacagctgctcaaagctcagcttggggatgttaggccactgggctggagtgcttcaacagtggcttaacctctggcatgaaggggatctgtggctattagcccccagaacaagatgcactccagtcatagttctaaatgtgagatggcacagtgcaatagctgtatgggccacagggagcaggacacagggtgggcttcttctctggaaggaacacagccatatatatatatggactctaggcagcttcctcagtcaggcttagtgtctaaaatactccagtggtgaggtctgtgggtgtccaatatgttgatgggggttattgggatcctctggtttaccttctcactgaattaggagaagttccttctaattctcagctgatcatgtgtaggggatgggacagtggaggtccagcatttttttttttttttcattctcaatgtaggcatcctgagtttctgtgctcattagagtttctgtgacttttctgatgcattcctgtactctccttcaagtatgtagttgtttattcatattcatactgtctttgggggttagaagcaataagagcttctagtctgccatgttgctgatgttactcctgtaattttattttcttgtagtgtcttttgtgtggatttggtatcaatcatggtaatggtggcttcataaaatgtgtttgaaagtattctctctacttctatttttggaagagtttaaaatagattggttacatatgtatacatgtgccatgctggtgtgctgcacccactaactcgtcatctagcattaggtatatctcccaatgctatccctccccccaccccacaacagtccccagagtgtgatgttccccttcctgtgtccatgtgttctcattgttcaattcccacctatgagtgagaatacgtggtgtttggttttttgttcttgcaatagtttactgagaatgatgatttccaatttcatccatgtccctataaaggacatgaactcatcattttttatggctgcatagtattccatggtgtatatgtgccacattttcttaatccagtctatcattgttggacatttgggttggttccaagtctttgctattgtgaatagtgctgcaataaacatacgtgtgcatgtgtctttatagcagcataatttatagtcctttgggtatatacccagtaaagggatcactgggtcaaatggtatttctagttctagatccctgaggaatggccacactgacttacacaatggttgaactagtttacagtcccaccgacagggtaaaagtgttcctatttctccacatcctctccagcacctgttgtttcctgactttttaatgatcgccattctaactggtgtgagatggtatctcattgtggttttgatttgcatttctctgatggccagtgatggtgagcattttttcatgtgttttttggctgcataaatgtcttcttttgagaagtgtctgttcatgtccttcgcccactttttgatggggttgtttttttcttgtaaatttgtttgagttcattgtagattctggatattagccctttgtcagatgagtaggttgcgaaaattttctcccattttgtaggttgcctgttcactgtgatggtagtttcttttgctgtgcagaagctctttagtttaattagatcccatttgtcaattttggcttttgttgccattgcttttggtgttttagacatgaagtccttgcccatgcctatgtcctgaatggtattgcctaggttttcttctagggtttttatggttttaggtctaaggtttaagtctttaatccatcttgaattaatttttgtataaggtgtaaggaagggatccagtttcagctttctacatatggctagccagttttcccagcaccatttattaaacagggaatcctttccccattgcttgtttttcttagttttgtcaaagatcagatagttgtagatatgcggcattatttctgagggctctgttctgttccattgatctatatctctgttttggtaccagtaccatgctgttttggttatgtagccttgcagtatagtttgaagtcaggtagtgtgatgcctccagctttgttcttttggcttaggattgacttggcgatgtgggctcttttttgcttccatatgaactttaaagtagttttttccaattctttgaagaaagtcattggtagcttgatgaggatggcattgaatctgtaaattaccttgggcagtatggccattttcacgacattgattcttcctacccatgagcatggaatgttcttccatttgtttgtatcctcttttatttcattgagcagtggtttgtagttctccttaaagaggtccttcacatcccttgtaagttggattcctaggtattttattctctttgaagcaattgtgaatgggagttcactcatgatttggctctctgtttgtctgttgttggtgtataagaatgcttgtgatttttgtacattgattttgtatcctgagactttgctgaagttgcttatcagcttaaggagattttgggctgagacaatggggttttcaagatatacaatcatgtcatctgcaaacagggacaatttgacttcctcttttcctaactgaataccctttatttcgttcttctgcctcattgccctggctagaacttccaacactatgttgaataggagtggtgagagaggacatccctgtcttgtgccagttttcaaagggaatgcttccagtttttgcccattcagtatgatattggctgtgggtttgtcatagatagctcttattattttgaaatcgttggaaaagcgcagtattcgggtgggagtgacccgattttccaggtgccgtctgtcacccctttctttgactaggaaagggaactccctgaccccttgcgcttcccgagtgaggcaatgcctcgccctgcttcggctcgtgcacggtgcgtgcacccactgacctgtgcccactgtctggcactccctagtgagatgaacccggtacctcagatggaaatgcagaaatcactcgtcttctgcatcactcacgctgggagctgtagaccggagctgttcctactcggccatcttggctcctcccccgcatgtgtctttatggtagaatgatttatagccctttggatttatacccagtaatgggattgctgggtttgaatggttaaatccaattcttaataaaagcttataaagaaatctatccaatcttaactagtttgaccataatgcaaactttttataaaccttttacaaccctttacaattttctgttgaacagcagattaattctataagaaaaacctgttactcaaatacatgggcccagattctggccctgtatcagtgtgcttttattttattgtttaacctacagagaaattaaataatgcccttcaaatcttagccaactttctcatacccgcagactttccttcacaagattaatgcttcacaaattcttcacaacttgcttgaacctttagtttttttcccccattactcttttaggttaggacaatccttaaaaactgctgaactagacaaaattacatctttttaacaaaagtcatactcccataccttttatcaccttttaccaaaatcacactttaccttccttacacaccctgcatgtgaaactctttcttcagtagtttcaagcacatgttataatattaacttttagcaactcttatttttggtggaaaagatggtaaacaagcaattttaaccatgtatcagattgcagatctcaggatgaggatagagctgcagatagtgtccaactctcccaaacttagccaggggacctggcctaagccttacctaaaatctaatggctataaaacagacaagtcaaacaattatttaaagtcatagaagcagtttatggccttaaaacacatggcaaacaggttcagcctgcctactttagaccaaatgtctaaattttgaatatatttattttattttaccaataatcttttacattgtcttttttaaagaaattagagtcccatgacctaaatccattaaagtttctatttttttctgacaatatgtttaagtgcttatatttaggacaattaattacagctcttttacaccacacacgtaacacacataatacacagacaaaaacggagatccaagacagaatttcatcaataaagaaatctttagagggagagtgggggctttaaaacaatattcacgcatatataggccaaatatcagctttaattaagtcaacttttaagtatagagatcttaagattctttaaaaatcttttattaccagcttttagccaagacaaagggccaatatttctggcttttgaattttttttactaaaggcaaccttctacatgaaatcagtaagtcttaactaagaggatggtaaccttggatgcatgaagtgtctccaaagagatggcaagcgatgggcaaagagacggcaagcaatttttatgagatgtagaatctccccaaaggtagttcaggaaaaagaaaatttcaagacacgaaatcagaagctgtccacaaagaggaaaggaagcaataaatggcaaaaagtcaaacacacataaaatcagaaaagactgattccctaagccaggaattgaacccaggccaccagcatgaaaagacaaaaaccttaactactgagcacaaggtgactgaaattgcttttcctgaaaggaatcttgagcagttatttttgaagttgcaaaggattttaactattcaagagaattaaggtgagaattaacataataatgtcccttttttagacccaagaatcaaagctttgtaactcaactgcacagggctttaaaggcaatacagaaagttacttggatgaataaccttttcaagtgcacaactggaattaacttttagataacttttgaattagataaaattattcttttttaaaaaaaaatagaacacattttccttggcacattttatgtaaacccaggaagcaagaaatcctaaattgcctatcagatactagcattttatagatgagcaccattctacaattttggaacgtgttctcaatataataatcttttcttaattggaaatgacccaggtatatacccaaagaattataaatcactttactataaagacacatgtacacatatgtttattgtggcactattcacaatagcaaagacttggaaccaacccaaatgtccatcaatgatagactagattaagaaaatgtggcacatatacaccatggaatattatgcagccataaaaaaggatgagttcatgtcctttgtagggacatggatgaagctggaaaccatcattctgagcaaactattgcaaggacagaaaaccaaacactgcatgttctcactcataggtgggaattgaacaatgagaacacttggacatagggtggggtacatcacacaccagggtggggggaggggggagggattgcattaggagatatacctaatgtaaatgacaagttaatgggtgcagcacaccaacatggaacatgtatacatatgtaacaaacctgcacgttgtgcacatgtaccctagaacttaaagtatatattttaaaaagtcagatgaattttctgcctaggaaaaagcatttaaattataattcatagttccaatgagttggcagtgaaattggggccatgagatgttccagcagcgatggagatggggcaaatcttatagtattaacatcacaccatttggcaataatgtcaaaagttacaaaaatacttgaaatcagtaattatgagaatgtatactgggaaaactttcaaaataaattcaatctatatgcaaaaaaagagaatgttccaatacttgaaatcagtaattatgtttatgagaatgtatactgggaaaactttcaaaataaattcaagctatatgcaaaaaaaagagaatgttcctattccttatttataatccttaaatagtgttcctattcctgaaagattaaagtcgcatgaagtaaaaggcattacagcttttatttttccttcaaaaaatattttatctaagtgcttatttttaaagccagttaattataactttttttgtataaccattacacacataacatatatatgactacacagacagaagaaaacccagcagttgtaaggtttttttgttcgtcaattttctaattggattattggcctcagggtggagctctttaagaacagggctaggaaagcatacagtttctagggcctaataaacaggcatacctgaaaggcaaaaagagattttgagtgggttatattcacctctaattcttggggtttcatgaggaaaagagagatgtctcacaaaatggaatccttggcattttttttttttccccaaggagtcccaggccatcagaagctatctagggcctttcatacatgcactgactggcaagacaaagtggagaaaagtaatttagtcaactgagaaaaaaaaaaaccttttcagaaaaacaagatccaaggagagaaaaacataaaaatcttttaaatatatctataacttggatatcctcttttaattaagctgagcattctttaagaatatcctttttcattaattaaaactttacagggaatataaacaatgattcttatcattcctttcactggtttgcacagggacagagaggccaaaagtctgactgtaaaaaaacttttatccttttaccagcatgtctggcttctgggttttctaggggagtttctttgaggtcctccttggctgcataggtttgcatgactgttcaaagccatattcaggttcttcagtttcctctgggaggaaagtgtctgggttcaggcaaggacaggtttttttaactggactgtagattcctctaacagcagagcctgatctttgaggaggtgattatctgttggccagggacttctcttagaagacagcagttctgccgcattatgtgggttatatacagttaagtcattcctcatggttaacttggtggccactgacaccagtaaagccactgctgtaactgctcagaggcaagctggccgtactttagccatcaactcaagctccttgcttaggtaacctactggctgttgagctggaccttgagcctgagttaaaactcccagggccattctcttcctttttgctacatagagactgaatgtctttcctatgggaagactaagggctggtgctttaagcaaggcttgttttaactggttaaagcctttttgagccccaggttcccaagtcagggactgagttttagctgcttgcatttcttttatgaggtggtataaagggcgagttatctcactgtacctgggtattcctagtttgcaaaattcaataatgcctaagaatcccttcagatgtttaagcattttgggaagggcaaagaggaaatgggcttaatcatttccttacctagtgctcttgttccttctgacaggactagatataggtactttactgaagtttgaaagagctgagccttaaattttgaaaccctatatcccctttcagctaaaaaattgaggagagcctcagtgtcttcctgagactttctcagttggggcacagaggagaatgtcatctacatactgcaaagcttcaacctgagggtgagaaaaatcagagagatctttggacacggcctgtttttgcaacttccttcagatattaggggctgcctgagtaataaacttgtcctttaagattagctgtccttcaattgaaatgagagatagaaaggtgtgtttcactaaagcttctctcagcctttccaaaaaggctgaggggttttcatctaggtttttttttttttttattatctattatggaaagcttgtagtagttaataggtttggctatagtcctttgtggcttctccaatatacgcatttgaaagagttttcttctccactcaccaatgctattattatggtcacatttagggtcctttaagggcactattactctcccaattggataaggctcttccccttccctggcactgtatgagacacaaagttcatctccaaatttctttgctgcctacagggccaactgtttctcagcagcagttagggtttgatttaagagtaacctaacatccttccagcagagtttaaatactctatatgtgagtgaagttgggactttcctaaagcaaacttcagggtctgacgattaaaagagatccaggctgcactcgaggaaagtgcaggcttgaagatgggttgttaagtatctggaaagagaggggagaaaaggcataccttagtccacttcctccttttggagtgacccagggtacagagaaaggtagaaagggcgtcctccttctcctctttcctcccatctcctctgggtcctggtggccatcaattgtgctgcccatggatgcaagcattaccacccatggatccagaggagctagtcagcaggagtagtcatgtttacctgtgagattccctagctctctacctatctctgggtatcccagacctactcgacctaaaaggctcccatggtaccccaggggcccaggagggattgtgcagtagttggatttgagtaagaccatttaatggaaggagtgtcttgactctgtccctggcttctcttactgtggccctagcaaagccctgatttcccagagaatgggaccaattgacttctaagcataaaatcctcttttgtttaaatgccaatgtagttgtgtttaggacaggtgcctcaaaaaatataaggattaaatggctgtcctaccttcgatgaggacagtactgagcctagaatttgtctctcaagggcagcttcctcctgactattgaaagtggagttttcctgcctacaaatagggcatgaggtctgatcacttatagagggatgcaggaggaaaaagagttggggaactagaggttttgggaaaagggtcaatatggccccccaacacagaaaaatcctattttgctaggtgttgtggcaataactgaaatgttaggtaaaaactgtgactccaaattctttctaggcagagaggtgtggggcttggtgggctgtccccacaatatgcctcccagcaaaaatacaatttgtctcatggaggaactgtttaaattcactggcagtgctgagcttttatgtggaggaataaaacaacccaaatggagaggagggtattcactcaggttgaaatatcctcctatagagtgccatgaatgactatcattggggaacaaaaaagcccttactaggtgaaagtttagttcagtttagtttagtttagttgaaagtttagttgaaatcttgaaatccccccatctcaaggaaatcacagaagcagcaattcttagagttacattcctggttactaaggcacttgctaactttacccaacaaggttatctccccaggctgtaaaaactccctcaacatagcatacaaagaagggataggagacatgagagctgcaaaaaagaaaagaaaggaagaaaatgtgataggaaagtctggaagtcctggtgggctgttggggactggagttagtccaggagtcttcaggtaacaccaaggtgcagcctccgccagatgccttcagttgccccaggaccttcttccagccccacatgatggctagatcttctgtgaaagggagctaggttggaacagagccaacattcccaacacccaagagtgatgggggattgataaagtcctctccatcaagcctgtcccctgaatcttgtaaggctggcagccactctagaagcttttaataggctgacaggggcccagtgttttgtttgatcttacaagaaaaaaacagaggataaggagccttggaaatgaaagtacagtgttggaggtcctctcctactcatctttctgatgtttcctttcctggccaatgcaccagtgttgcattcttgttatctgaggtattactcagagtattatctgcttattctactgagtaacatttctgcagtttgcagcaaaacccttaatattataaaagaagtgaggtggagccaagatggccgaataagaacagttacagtctacagctcccagcgtgagtgatgcagaagacggctgatttctgcatttccaactgaggtaccgggttcatctcactgtggagtgttggatagtgggtgcaggacagtgggtgcagcgcaccgagtgtgagacgaagcagggcgaggcatcatctcatccgggaagcacaaggggtcagggaattccctttcctagtcaaagaaaggggtgacagacggcacatggaaaatcgggtcactcccaccctaatactgcacttttccaatggtcttagcaaactgcacaccaggagattatatcccatgcatggctcggagggtcctacaaccacggagcctcgctcattgctagcacagcagtctgagatcaaactgcaaggcagcaatgaggctgggggaggggcgcctgccattgccaaggcttgagtaggtaaacaaagcagccaggaagctcgaactgggtggagcccaacacagctcaaggaggcctgcttgcctatgtagactccacctctaggggcagggcatatccaaacaaaaggcagcagaaacctctgcagacttaaatgtccctgtctgacagctttgaagagagtagtggttctcccagcacacagcttgagatctgagaacggacagactgcctcctcaagtgggtccctgacccccgagtagcctaaatgggaggcacccaccagtaggggcagtctgacacctcacacagccgggtactcctctgagacaaaactttcagaggaacgatcaggcagcaacatttgcttttcacccatatccgctgttctgcagcctccgctgctgatacccaggcaaacagggtctggagtggacctccagcaaactccaacagacctgcagctgagggtcctgactgttagaaggaaaacaaagacatccacaccaaaaccccatctgtacgtcaccatcatcaaagaccaaaggtagataaaaccacaaagatggggaaaaaacagagcagaaaaactggaaactctaaaaatcagagtgcctctcctcctccaaaggaatgaagctcctctccagcaacggaacaaagatggacggagagtgactttgacgagttgagagaagaaggcttcagacgatcaaactactctgaactaaaggaggaagttcgaacccatggcaaagtagttaaaaaccttgaaaaaaaattagacgagtggctaactagaataatcaatgcagagaagtccttaaaggacctgatggagctgaaaaccacggcatgagaactacatgatgaaagcacaagcctcagtagccgattcgatcaactggaagaaagggtatcagtgacagaagatcaaataaatgaaatgaaatgagaagagaagtttagagaaaaaagaataaaaagaaacgaacaaagcctccaagaaatatgggaccatgtgaaaagaccaaatctatgtctgattggtgtacctgaaagtgatggggagaatggaaccaagttggaaaacaatctgcaggatattatccaggagaacttccccaatctagcaaggcaggccaacattcaaactcaggaaacacagagaataccacaaagatactcctcgagaagagcaactccaagacacataattgtcagattcaccaaagttgaaatgaaggaaaaaatgttaagggtagccagagagaaaggtcgggttacccacaaggggaagcccatcagactaacagctaatctctccgcagaaactctacatgccaaaagagagtgggggccaatattcaacattcctaaagaaaagaattttcaacccagaattttacatccagccaaactaaccttcatacgtgaaggagaaataaaatcctttacagacaagcaaatgctgagagattttgtcaccaccaggcctgccctacaagagctcctgaaggaagcactaaacatggaaaggaacaactggtaccagccactgcaaaaacacgccaaattgtaaagaccatcaatgataggaagaaactgcatcaactaatgatcaaaataaccagctaacatcataatgacagggtcaaattcacacataacaatattaaccttaaatgtaaatgggctaaatgctccagttaaaagacacagactggcaaattggataaagagtcaagacccatcattgtgctgtattcaggagacccatctcatgtgcagagacacacatagtctcaaaataaagggatggaggaagatccgccaagcaaatggaaaacaaaacaaaacaaaaaagcaggggttgcaatcctagtctcggataaaacagactttaaaccaacaaagatcaaaagagacaaagaaggccattacataatggtaaagggatcaattcaacaagaagagctaactatcctaaatatatatgcacctaatacaggagcacccagattcataaagcaagtccttagacacctacaaagagacttggactcccatacaataataatgggagactttaacaaacatcccactgtcaacattagacagatcaacgagacagaaagttaacaaggatatccaggaattcaactccgctctgcaccaagtggacctaatagacatctacagaactctccaccccaaatcaacagaatatacattcttctcagcaccacatcgcacttcttccaaaattgaccacataattggaagtaaagcactcctctgcaaatgtaaaagaacagaaattataacaaactgtctctcagaccacagtgcaatcaaactagaactcaggatcaagatcctcacttaaaaccgctcaactacatggaaactgaacaacttcctcctgaatgactactgggtacataacaaaatgaaggcagaaataaagatgttctttgaaaccaacgagaacaaagacacaacataccagaatctctgggacacattcaatgcagtgtgtagagggaaatttatagcactaaatgcccacaagagaaagcaggaaagatcaaaattgacaccctaacatcacaattaaaagaactggagaagcaagagcaaacacattcaaaaagtagcagaaggcaaggaataaataagatcagagcagaactgaagaagatagagacaaaaaaaaactcttcaaaaaatcaatgaatccaggaactgtttttttgacaagatcaacaaaattgatagactgctagcaagactaataagaaaagagagaagaatcaaatagatgcaacaaaaaatgataaaggagacatcaccaccgatcccacagaaatacaaactaccatcagagaatactataaacacctctacacaataaactagcaaatctagaagaaatggataaattcctggacacatacaccctcccaagactaaaccgggaagaagttgaatccctgaatagaccaataacaggctctgaaattgaggcaatcactaatagcctaccaaccaaaaaaagtccaggaccagacagattcacagctgatttctaccagaggtacaaagaggagctagtaccattccttctgaaactattgcaatcaatagaaaaagagggaatcctctctaactcattttatgagggcagcatcatcctgataccaaaggctggcagagacacaacaacaaaaaaaagaattttagaccaatatcgttgatgaacatcgatgcaaaagttctcaataaaatactggcaaaccgaatccagcagcacatcaaaaagcttatccaccacaatcaagttggcttcatccctgggatgcaaggctggttcaacatatgcaaatcaataaacgtaatctatcatataaacagaaccaaagacaaaaaccacatgattatctcaatagatgcagaaaaggccttcaacaaaattcaacagctcttcatgctaaaaactctcaataaactaggtattgatgggatgtatctcaaaataataagagctatttatgacaaacccacagccaatatcatactgaatgggcaaaaactggaagcattccctttgaaaactggcacaaggtagggatgccctctctcaccacccctattcaacatagtgttggaagttctggccagggcaatcaggcagaagaaagaaataaagggtattcaattaggaaaagaggaagtcaaattgcccctgtttgcagatgacatgattgtacatttagaaaaccccatcgtctcagcccaaaatctccttaagctgataagcaacttcagcaaagtctcaggatacaaaatcaatgtgcaaaaatcaagcattcctatacaccaataacagataaacagagaaccaaatcgtgagtgaactcccattcacaattgcttcaaagaaaataaaatacctaggaatccaacttacaagggatgtgaaggacctcttcaaggagaactacaaaccactgctcaatgaaataaaagaggatacaaacaaatggaagaacattccatgctcatgggtaggaagaatcaatatcgtgaaaatgggcatattgcccaaggtaatttatagattcaatgccatctccatcaagctaccaatgactttcttcacagaattggaaaaaactaaagttcatgtggaagcaaagaaaagcccacattgccaagtcaatcctaagccaaaagaacaaagctggaggcatcacgctacctgacttcaaactatactacaaggctacataaccaaaacagcaaggtactggtaccaaaacagagatatagaccaatggaacataacagaaccctcagaaataatgctgcatatctacaactatctgatctttgacaaacctgacaaaaagaagaaatggggaaaggattccctatttaataaatggtactgggaaaactggctagccatatgtagaaagctgaaactggatcccttccttacaccttaaacaaaaattaattcaagatggattaaagacttaaaccttagacctaaaaccataaaaaccctagaagaaaacctaggcagtaccattcaggacataggcatgggcaaggacttcatgtctaaaataccaaaagcaatggcaacaaatgccaaaattgacaaatgggatctaattaaactaaagagcttctgcacagcaaaagaaactaccatcagagtgaacaggcaacctacaaaatgggagaaaatttttgcaatctactcatctgacaaagggctaatatccagaatttacaatgaacccaaacaaatttacaacaaaaaaacaaacaaccccatcaacaagtgggcgaaggatatgaacagacacttctcaaaaaaagacacttatgcagcctaaagacacatgaaaaaatgctcaccatcactggccatcagagaaatgcaaatcaaaacaacaatgagataccatctcacgccagttagaatggcgatcattaaaaagccaggaaataacaggtgctggagaggatgtggagaaataggaacacttttacactgttggtgggactgtaaactagttcaaccattgtggaagtcggtgtggcgattcctcagggatctagaactagtattaccatttgacccagccatcgcattactgggtatatacccaaaggattataaatcatgctgctataaagacacatgcacacgtatgtttattgcggcactattcacaatagcaaagacttggaaccaacccaaatgtccaataatgatagactggattaagaaaatgtggcacatatacaccatggaatactatgcagccataaaaaatgatgagttcatgtcctttgtagggacatggatgaagctggaaaccatcattctcagcaaactatcacaaggacaaaaaaccaaacactgtatgttctcactcataggtgggaattgaacaatgagaacacgtggacacaggaaggggaacatcacacaccggggcctgttgtggggtggggggaggggggagggatggcattagtagatatacctaatgttaaatgacgagttaacgggtgcagcacaccaacatggcacatgtatacatatgtaacaaacctgcacgttgtgcacatgtaccctaaaacttaaagtgtaataaaaaaagagaaatttgtaaactttcttagaacattatgagttttttttttttacaattttttttttttagctcatcattctatcgttagtcttagtatattttatctgtggcccaagactattcttcttccactgtgggccagggaagccaaaagattggacacctctggtttacagggtagataatgaatatttctataaaaattgtatttctatgtactaacaatgactaatttaaaattgaaatttaagagtactttttacaagagcatacaacatatacttgagacatataagatttgcaggatatatacactgaaactataaaagattgcggagaaaaattaaagatctaaataaagggagagatatgccacgtttatgggttacaacactcaatattgttaacgttaaaattctcttcaaattgatatacatatattcaatgcaatcccaatcaaaatccacaatacttttattagaaaatgacaactaaattctaaaattcatatggaaatgcgaagaacttagaaaagccaaaaacaaaacaaaataaaaacagaaaaaatttgaaaagaagtacaaagttaaaggaatacattgcctgatttaaagacatagtgtaaaattatgttaaataagactttaaaatattagcaaaaatacagattaaggaagtgcagaaatagaccaacaaatataagatcaaataattttaaagaaaggtgcaaaggcaactcactgaagatcgtgttttaaagaaatgttgttgaatgaactggacatctgtattaaaacaaaaaccaaaaaacaacactgtaaagctgtgaccccaaacctcacatggtatacaatattcaagaactacctcaaaatggattataaacctaaaagtacaaaactttaattaagtaacatgagataatttcttaaatcttggcaaatacttctgagatatgtaccaaaaatatgttcaatcaaaggaaaaataacacattcaactttgtcaacagtaaaattttctgctataggacagactgttaagatgaaggtaaaaaagatccataggctagaagactatactggcaaatcacatatctgaaggaggacttgtattcaatacttattaagaaccctcaaaactcaataataaagaaaagagtttaaatgggcaaaagatttgaacacttaaaagtccaaagaagacagagggatggcagtagtacacataaaaattgtaaacattagtcattagggggatacaaagtaaaatcacagagaaataccactacacaccaaatgagaatggtgaaaattaaacactgaccataccaagtgttggtgaggacatggagttcctgaaatcctcgtaacactgtggagagaatataaaatagtataaccactttggaacacaatttgtcagtttgaaaaaggtaaacatccacttaccctgtaagttggtgtgcttatgcttattttctgtattttatggtgacatctttaaaagtttgctggctctggagagactgcccctcccagggctagccctttcttagagatggcaaaagccttgacccagagcacctctctcatatacagccaaccagtctagagtctacagccccaattacctctttatccaactctcacaccccacgccaatatctctcctgcactaaagcaccccaggaccaagtaccaggtaaccagagaccaaccctgtaggccaaagcctgctgaaattatgcaaactagctaatcacaagctgcttactctgccctgcctggtcttttccatggaaaccccaataaaggctgtggcctatgttttccccttgctcctgcctcctgaccaacactggtgctttccatgtggccctctgtggcacgatgcctttccttctcttggaaaatgtgaatggtgaattatttcaatggcactggcttctctgtgttgtcacttagtcacctgtataaattaacatcccacaggtagaaatgaaacactcagtcctgttactcctaggtattaacatataagaaagactagtacatgaatgttgatagcagctttatttgtaatagccccaaactagaagcaatccaaatgtcctttaacaaatgagcagcaaaattgtggagtatctatataaagctatacacgagtctgtaataaaacaatgaagtgttgacacatgcaacatggaggaatctcaaaataattatgctgagtgagaaaaaagcaaaaaacagcattttgttattccatttatgtaaagttttagaaaaagaaaataagtctacagcaaaagacagtaaatcaatgtttgtggcaatggggtgccagggagggagggaaagagggattttaaagggggctgagatgactttgcaggtgatgaatctgctcattatcatgattatggagatggtttcctgggtgtacacattagataacacttaatacatttacattttaaatatgcacagtttactgcgcaacaatatctcaatagagctttaaaaaatggctccacataaaaaatctgggtctcctgcttctcttgaaaaaccagaaaatttagtacatatataagggactccataactattctcattctttggaagggacagccctgcttcaatgggagcaaagactagcgagcaataaagcttgtttgtgagtcacagaagtcacatgcctagactctgatctctcctctctgtcccgtttcttgcttgtgtagcaatggcctagaggtgaacagccacaacagcctcagcaatccagaacacattcagattatttgctctgccattgaccttgtgcacaggagactaaatctggaagtcctgaaaatatctgtgtaccctcatgcctcacagctatagcacactctggaagcatgtttagatggggcacataccctctattttgttgccctgagctctatgaatcacatgcagtatgtgaatgtaattatggtggtctgcaatggcctcagcccactcatgatttcctccagggaagcggagggagtacagaggtctgccttcactgagcaccctgggtaacctaaggtacacttgccagctggtagaggtgaaatggcttctcccacaggtactggcagtgacagaactcaggtaagagccttgggcaggttagaaagtgcaatgcaactcctgaaagcttcccacctacctggcactcacacggaatctctccagcatggatgtccagatgtgagattaacttttggctgattgatagctactacacaaagctactttcagagcttctgtccggtgtcacccactatgtggaccaagcagacagcatcctccctgcgttccaaggccttcctccagggtgaactttctggcaccacataggctgttggtttaagccttttctccagtgtgattttttttttatatttaatgaggttggacttgtggctaaataatttcctacattcactacactcataaggtctttttctagtatggactctcaggtgttgaacaagtatagatttaacgctgaaggctttcccacattcgctgcacacatagggcctttcaccagtgtgaactctctggtgtaaaatgaggctggatctttggctaaaagatttcccacattctgtgcactcacagcctttcaccagtgtgaactctctgatgtgcagtaaggccagagatttggctaaaaaccttcccacattcagtgcacttataaggcctttctccagtgtggattctccaatgccgagcaagtgtgattttgcagctgaagcatttcccacattcactacacttataaggctttgccccagtgtgaattctctggtgttcaataaggccatagctttgtctaaaggatttcccacattcactgcattcataaggcctggctccactgggaactctcgggtgtataatcatgctggaattctggctaaataatttcgcacatttgctgcactccagtgtggactttctccagtgtggactctctggtgctgaatgagtgtgtgtttgctgctataggctttcccacattcactgcatctgtaagccctttctccagtgtgaaggtttttatgcctaacaaggtgggtgcttctgctgtaggcttttccacattcactgcacccataaggcctctctccagcgtgaactttcttgtgttgaacaagatgggagctttttctgtaggctttcccacattcgctgcacccgtaaggctttaaacccatgtgaactctctggtgtacagtaaggctagagttatgactgaagaatttcccacattcactgcatttgtaaggtctttctctgctgtggactctctggtgctcacaaagcctatttctgtggctaaaggctttcccacattcactgcacctgtgatacccttctccaatgtgaaaggcctccttgcactcagtatttctgggtgaattctgggtctggtactggagaaggcctgacctgggcaggaggtccttctcacagtacccacatgtgaagggattcactgacatgtagactctgcagttcttaacaaagccctatccttatctctgctgaggcatttctctccactgtgctgcctctggtgctagggggtgtctgtactgacccagaattgtctcccacatgccccccgtgtgtgcagtttgtgcccggggtgtattccctgatgctcagccaagagcaaaatgtctttcatgattggaccacaaatcccacaaggggaggctttctgggcagctggacctgccttaggagccctgacctgtgacactccttgagaagatggctcctcatcctccattagaaaccaacaacctgaaagcaaagaaatattgaagtatacatacagcctggtgggatctactgggttcattgcaagactcctggtctaggactgactttcgtgggagaggcagccctatcacagtgtgtgtcttacaaatgcaggaacaagtacacaggactcttggggggctacgggggttacaggtgacaaagagtctactgtgctaagcctggcatcatgatacaatggggaggtctagggaggagcaagggcacagcgatgggatgcagcccaggaaggagaggctgcatctccctctcacttctctgcaatggcttttagcaggagcttgtctgctggtgacacaggagcactgaacaaaagggtgtgtccagactcaggaaaaccaactgcaactgagtagctgttcaagaactacttaggctatgtgaacatctcacaaaacattatgtgtagctcagggttagagaacactgcagagggaacagtggaaaggaaggggtgagacctggaaatcagagaggtgggagtcggccctggccagattcagtgtaggaaagagaaatgggcaaaatgtcaagaatgcaaaacatagaaaagagttatggcccctgcccttggtataaaaacaatgatggacactggcaaggttgctggaatcatgagaactcagccctgacgttaagccatccctcacttcccacttaccagagccagtccccgccagagtccctcctcccatagctttgtcaggcatccatgtctcttcctccagccccaagtggacaactacctgagtctgggaagatgcaaggcctaagggaaagacacgacaggtgagtggacagcaggagcgcagagtaacccaccccatgacagaccccaggaaagaaaactagtattacaaaaagagcctcagaagaagatcccataggaacagcccagtggtccctgaaaatagtaaccacattggtcctgcaattcccagcacagtgaggcatgaggaaatgccaccaggagggaagggggcagaattgggggcagagaggtacaatgattctgcatagtcactctgccagggcgaggccaagcctggtgggatctattgggttcactgcaagactcctggcccccatctccttccctgcaaggccttagggcaccaggtagtggggctgcctggggaggggacagagaatgcactcagtccagccctggcacccacagcatctatgcaagaaaagctaggaagggagcaatgtccacagcctggctgtgggaaggaaacagcagctcctggaaaaaagcggaagcaaagagcccagcctgggatgctgaggtatgagggacttacccagcgaggccacaagtgcaaagttctccagcatcacatcgcagacagacaccgggtccatcgtgagtccctcgagcttcaattcttaaaagtgctacactccacaactcatcatgagacaggcaaaatcataaaaaaaaaatggctgggtgatttttctaaaattgctaaaatggttgataataaatattttgtgttatttatttatatggtttttattttttcctgatcagatctataaggcaaaaactctctctagagaggaaaataatgaatgtttggtttgtcaaacccgtaattctggaaaggcaattaaaatttcaggtgggaatacaccacccgatgggctatttaaaaattgacagatggatttctctcaattgccaacttcaatggcatatcagtatgttctcttaagagtttgaatgttttctggttgggtagaggtaggtaagctgaggctgtgacagtagtttaaaaagtcattagaaagttattagaaaatgtgtttccttgctggggcatccctggagaaatccccagtgataaagggagaccattttacttgacaagttataaagtagttatataacataagatgtcatggacacagtggcattaacactgtccttatcaccctcagtcttctggaaaggtcaaaaggacaaatggcattttgaaactgaaattgggctgggtgcagtggctcacgcctgcaatcccagcacttttggaagctgaggtgggcagatcacttgaggtcaggagttcgagaccagcctggccaacatggcaaaaccccatctctactaaaaatacaaaaaattagcctgtggtgcatgcctgtaatcccagctactctggaggctgaagcaggagaattgcttgaatccaggaggtgaaggttgcagtgagccaagattgcgtcactgcactccagcctggatgacagaggaagatcctgtctccaaaacaaaaaaaaaaaggaacacccatccccccccaaaaaaacaaacaatgacaacaacaaaaacaaaaacaaaaacaaaactgaaatcggcaaagctcattgaattgattatatttccacggccaactgtattaccattggccttgatagcaatcagattcatccccaccagaaagcataaattggcccctgataaaatagtcactggaaagtttatgcccctaataatagaatttcactctcttaaactctgatatgactaaatacttcaaaggtttaatgccaaaatatattatcaccaggtaaaggaagcttttcatgatccaccaatgagaacaatcaagccctgcatgatttggaatctggagattgggtcttctggaaatgatatcagaggaagattgcccttaaaccccaataaaagggaccatatcaagttcttcttcccacccaaattgcagtaaaacttcagggttgcaaaccttagatctacatcacacaattcaaagggacctctgcagactcttgaagtttttctccagaagcagacagcatcttacatatgtacagctctcctaagaccatgggccaagacttacctccatcctgaaagccgtatccttttactttttttcccctaattttcttctgccccaattatttccttttccttacaggaaaatccatgggaccataatctgtggatagctttacctaaggcttattctgtagcaaaaaacttgagtaatccttgggcttgtgggttaatgccaaaaactcaagaagcaatttcacaaatgccaatgcctccctgtgttcccaattcaccctgacgctccaaaggaagaacagaaagctatcttgatattctagacatcactaccacttgttttcctacacttgctggaaacaatatcctaacctttccaattagtaacctaatcactaccaaatatagaaaacacattcgagtgatgcctgcaaaagatgtattatgcttccaggcatcacatactcaagatctggggactatgtatgcaggctattcgtgcatagtatcataagtaattgctatataatgtcaccagaacaaatccagtagggtccttcttcatgtggttatacaccttaacagcatgctgtaaagggaccacaaagaattttcccactgaactttgttcaggagccatcaggcttacaggtcaaatttaacttacttctgctcaaacaccaccaggaggcgctcttttccaatgcttgaggacctatcttgggtccgcagagaatttgcttaccctttcttcctcttcactggtttagatcttgctctttgatgggtctcactcctgccttttgaatagcttcctctgacagttcccataataccttccataatcagaggccaaaacagtaaacaaaatgatcatcggccttgaaagagactaagataagctagtttctactgaggaaaggttccagtggggttcctgagggcttgctcttggtggtagtagggtgctggtagtgtggaattcagaacagatccataaattggggaaaatcttggactttatggccaaccaaaccttccagtggttcagtagaagccaccctccaaaaggtagatgataacctatgcatctaacaaaacacttaatagaatatcatgcagcttaatttatttgagataaggtcttgctgtgtcacccaggtgggaatacagtggggctcactgcagcctcgacctcctggactcaagggatccccccacctcagcctcctgagtatctgggatcacaggtgtgcaccagacctggctaatttttaatttctctttttttttttaaatagagacagggtctccctatgttgcccaggctggtctcaaactcctgggctcaagtgatcctctcatcttggcctcccaaagtactgggattacaggtgtgagcccctgcacccagcctcatgcagctttacatcattttgatcatgttggggacttgtgctgaatcaaactgagtgctgtatctacacttcccctgattttgctactatggaaagcttaatttaaaaggtggctatttctttagatacttttatcaaatacatgaagaaaatttcaatagatgaagaaaaaaaattttttttaactctggtaaaatatacatagcatgaagttaatcattttaactatgttaagtgtatagttcagtggcattaagtacattcacgatgttgtgccaccatcaccactatcgatgtccaaaacttttcatgaatggcaagcttagcttttccagggtttttgaatctttatgtttttttctggtgggtctccaggttactatgacttacagtaccaggctaatgacataaactgatacctctttattattatttttttccagatgtgaaattataaatgcagggacttagagctcatacaactttaaaaaggttgggaaagtgaagttatcaccacttggttatatctcctaaggaaactaatttgaggtctccccttctcaatttttccttctttataggtactattaatgccctagcccagcaacctgacttattattgaatatattcggggtgtgatggtgaatacttaatcaccatcacaccccaaacaaagattatgaccaattggactcaaatactattgagctgcttatatgcctggactttgacttgtttggttttgactggttttgttcatagggcctcctgtgaaggagtacactttggtctcttggtattattttctggtagtcatcgtaatagtccccctggtgcactgtatcctgtcaaatcttaaatgtgtgtatgcagacatccattgtgcactgaatggtctccctttggctagatcagcaagaatacaattatttaactgatctgacatcatgacttgtgaattccgtgctgaggccaagtaagtctaatacaatggtgacagacagtgtcaatgcccagggttttggtcactatgtcaaaatccaatggctgacccaaagtggggaattggcaaattgaactaaatttggcctgaggctgtctccatatcttgagtcctcgtggagctggtttggagtttcgttttggaatttggtagcggaaggtcaaggtcgtttgccagatggctataacttctctttatgctcaaagatcttgacagtatgtaaattgggtgatcaccttttctatttctagttttggttgatcttctgttaggtttgaccaactcttggcccctcttatgtcgactaaaactcctgcagctgcagaaagtcaagttccagcactagaaacaaggaccagttaagagaaatcattttaccccaaaaatatatttctttgacatattttgaagggaccctgctagatctttcctagtctagatctaggaaagattagctaaaggtcttcattctgaaggctcccatatgtacacattaaataaatttgaatgccatttcttctaaaaatcaatcttcctcatgtcagtgatttacagtaaacctttcaggggctaagagccttgtccccacagttttggtgcagcaagcagggtctccaatgccactctgctgttttggaagctgcagtgaagggaacccaggaagctgacaagctggcaaaaagggtaaaaacttcttacccgacaggcttccagcctctctttctgtgcaatttagttgagcagacgataaaagatcagttctgtctcaaaggattttgtttttcttttctataaaggcaaagggctagtgggagatcctcagtgtcctcagtatcactggggactcctgcaatgctacccacaggagagcccctccacccttgtgggccctaaaactaacatagggagctgctgaaagattgtaccatggcacatatgtgaggttttcttcaaaacagattgtgttgcaggaactgaaacaccaccaaaaacaatcccattaaatgtgggcaaaggggccgggcctggtggctcacacctgtaagcccagcactttgggaggccaaggcaggtgactcacgaggtcaggagttcaagactagcctggccaacatggtgaaaccctgtctctactaaaaatacaaaaaaattagccgggcatggtggcgggtccttgtaatcccagctacttgagaggctgaggcagggaattgcttgaacccaggaggtggaggttgcagtgagtcgagatcgtgccactgcactccagcctgggcgacagagcaagactccgtctcaaaaaaaaaaaaaaaaaaaaaaaaagtgggcaaaggacatgaaccaacatctctctaaagatgacatacaaatgaccaacacgtatatgaaaaaatgctcagaatcacaaattatcagagaaatacaaataaaaaacaatgcaatatcacttcacccaagttagaatggctgttattaaaaggacaaaaaccaacagacgctagtgaggatatggagaaaaatgaactcttagatactattggtgggaatgtaaattagcacagtcactatggaaaacagtatggacatttctcagaaaactaaaactaaaactatcatacaatccagcaatcccagtaccggttatctatccgaaaaggaggaagtcagtctatcaaagggattcctgcacttgtatgtttatcacagcactgttcacaatagccaagatactcattcaacctaagtgtccatcagtgggtgaatggataaagaaaatgtggtacatatacacaatggaatactatccctatattattactataaaaaagagtgaaatcatgtcttttgcagcaacatgaatggaactggagaaaattatgttatttgaaataacccaggcatagaaagacaaataccacatgcactcaatcatgtgtgggagctagaaaagttgacctcataaaggtagagagtagaaggatagacactacaggctgggaagggtgtgggtggggggagatgaagagagggaggttaacgcatgaaagcctacagttagataaaaggcataagttccatcattcgatagcagaatagagtgaccataactaacaaccaaacattgtgtatttcaaagtagctggaagggaggacttgaattgttcccaatgcatagaaatgataaatactccaagcgatggacccttcaaataccctgaccttatcattacacattctatgcctgtaacaaaatacctcatgtactccataaacatggaaaatattatgtatcaattaaaaaaaactattcctagaatgatggtaaaaggagaacattagacaatttctgttcaatgaggatagtccaaatttgagtaaaagtttcaaaaaaatattaatttaaggagaaaaattggtagaacacctgatgaagataaagatggacaatgtgaggtctaaatatccacaagaagtcagaaagttaagcagaaaaaaaaaagaagacaattactttctacagaaaaagaaaaaaggctgtacaagaaggtaggaaaggtaattacagtgtactatatatcccatctgtgaataacatttatacctttatgagtatatcaacaacagaagatttgtgatttgtgatttatgatttgtgattatatcaacaaccaaagttttgcagaactctattgggatgatgggtaacgtggcatacgagcagacagataactaaatcttccacttcatctgcaatattggaaagtcaacagatagtgcctaaaataaaaattttgtttgtagaggcagggtctcactatgttgcccaagatggtctcaaacttttggcctcaagagatcctcctgcctcagcctcccaaagcactgggattactggtgagtgccaccttgcccagccccagccttgtttttttgtttttttttttgtttttttttttttactctggtaaaatatacatagcatgaagttaaatcattttaactttaagtgtaaagttcagtggcattaagtaaattctcaatgttgtgccaccatcaccactatcgatgtccaaaactttttcatcatttcaaacaaaaattctgtacccatcaagaaataactccccaggctctgccctgcccccttgtaacctctcttctacttttgttttatagagttagttgcttattctgggtaactcatataagtgaaaccataccacatttgtccttttgcgtctggcttatttcacttcgttttatttcttaagtgtcagccatgtcacacatatagaaaaagttcatctttttcgccaaattatattaatatatcacatgtattcatttatgtgctgacggacacttaggacatttccatggactcacataatttgatgcaagtagaaacatttataattaacacaatattttatgaaaggctcatatgtaataagtactattaactgagtgcccactttgcagaacctgtgtgaggggctttatataaactgaagcacaacgagcttgggaggtgggaattgctgtcagtttcacagatgagcaagctgagtttctgtgtcttcagagctgaaagtgcctcacccaagtgtgcagtccagagcctgtgctccttccactgcacgcccaggtgtcgctcatgaacacagacacagggagaaacacacacacgaacccagatgtctacccagaaatatcttcgtgaagggacaataaacgcacaggcaaacattcagacaaactcacttagcaaatgtttgttgagcctggactcggtggcagattctgatctaggggatgccaggtgcagatacatttgccaagacacagggtcatgccccaggggctcctgggcacacatgcacacacagacctgcgcgctcacaccacagtgctcagcccgttcccaatcccaggacactccagggaggacagagactgtcacgccaacacccaacccctcccactgcaggctgagctgagttcctgatatgctgccagcccaacagcatagccaagggccctgggtctctctgcagacctgccctgaccccacttatgtgcatacacagacacacagacacacacagacacacacagacacagacacacacacacacacacacacacacacacacgaaggtgtgtgtcagttgtccagatacacataaagctcatccatggccaagtccctgcctctgcctgctgggaccagactccactgtcatgaggatgacacccaccgcctgtgctcttctgctggctctaatctgcagcgtccagctgggtgagaaagaagcgggcagggctgagaggaaacaggtggccctgctccttcaccgtcattgccatcccagggtctcagctgtcactattgcagacatttgccaggggaggtttcagtgaattctgacctctgctgctttcttatcttgcctcatccaccacaggggatgcctgcctggatttctataagttgtttgggagagttgcttttgcatacccagaggacctgaagcgggagcttgctcaatacaaccccagccccctgacagaggagtccttcctcaagttctagcaatgctttgcctctgtttcattcccagaaagccttgctgttgttggaatatggtaagtgtgccctggggaacctgcacatgctgcacagccacaagtcccaggccttatgccctgcacttaccttcccttcctgcttgccatatcctgagcaggaagccacatcccaggatgctcatgatcagatgaaggtgcccacaggcctcaacagggcctcctgcctcacctttttcagccctgaacccagacactgcaaccctgcaaggggagaacctctgcccctggtgcccgggagaggcccagggacacagggaaccacaatcactacatcaatgcactgatgatgagcacacagcaacacacactcacacaggatgctgttaacagcaacacacacactccatgcctgcacaggcacatgcatacacgtgtgttacaccaacacatgcagagtcacactcaagcaggagtcacaacccacactcactgtgtttgtccagagcctgggatccccaagaaatggacagaccttaaggagctcctctgacctctgggactgggtgttaatgatgggtctggggatgctttcacagaggctcccaggtccccactttatttctttcccaacagtctaggatcgttgtcagcgatgactgcaaagatgtgtagatacttccttctgatctgaggacccctgcaacccacctggccctcccttcctcagggctccccacactcctggcctgactctatccatcaacaaacaatccccagtaaacacctgcagctcagctctgtattctggcgtctctgtggggttggctgtgaccacatatgcagtgtgtgaccagggtctgcctgcgaaattacgtgactgaggaagaactcaacaggaatgtgtacacatgtgtgttttctgagcccaggaaatcaaccctaacacaatcctccatctcctcctacccaagtcctccttctctctacccccagcacaaccccaccccgccttgacccaaccccccaggactccagatgctggaggctgggaaaccttgccctcctggctgagtcacaggcctcagcgtccccataaatacctgcagctcagctctgctcctcgggctgttgggaccaggcaatctgcatgaagccatgggggtctctgtggccatgtgaccatgacaggggacactgaggtcacagggaacgagcaccactctcaggcatggtgcctctgtcccacctcacccttcagttgatttcgtcctcgctggaggtctcagtggccttcaatgcattgacaaggctccaccaactccctctggggaaggtccctccccaaacctcaggccctttctgcaggctccttggatctcctgggcaatggccacctgtgcccatcagcccacactgccctaaactcctctgtctccctcccagactctcactgccccaaatatcctttctcctctccactcattctttttgttacctctcagctgtcatttcctcccgggtcagacatttctggcccccatctcaggccacgtcttctcgcctttgtccccagaattgccttcacttaacacactgtctgccccagtcatcacccatgcactcagccagggaaggagtgtctcctgccacaggtcaggccttttcccagagccggacaccccatgaagaacaaggcagatgagggcgctgcttccctgaagttcacatccaaggtgaagagggggttgtaaagctgaagaaaattgtaatagtgatgagaaccacaaggaccacccaacagggaaatgtgatcgggtgggactggcttggggtgccacattgggtcaggtggtcccagaaggcacgtgaggagacatctcccgagtcctgaataacctgaggcagccaccaggtgaaggtctggggcagagaatgcagcatgatgagaaagggtttagtgtgtcggagaaatggccagtgtacctggaacaaggggcagtggggaagggggtcacgttgggctggagcagctgggtggatgcgatgccactcctgagaggtgaagcctggggagaagcaggtttagggcaaagatccggaatcccacactggcctggataagtttccaatcaagatatccattagccatccaggaggatgagacacagaaactgtgagacacgctagtttggagctcatgggagactcaggcctggagacaaaaatatatgctttcaacatgtaggtggaatttaaatccatggagataaagacaagaataaatctcatgttatttaattcagacacacataacattcagcttttaacgatcaaaggccacgagtttcaactataagttaatgaaaacagttaaaaatgtcctgagaaattttggacaaagaagctgttgatgtaagttctctgaggatgcaaaagcatttcacatgtgtttgaaagaataaggaaaatgttagagaatatttgtctggttaccatgagtctacccataatctgtaagttgtcatgaaattgaataatttcttaaaattacaatgtcctttaatcaaaacatatttattgccaagctatgctttttaaattaattttgttcatatttatctagatggcaaatccacagaatatattatgttaaattatgatctttgtattaacgttaaaattttgtgatgtgtctttttccttttttccacagttttaatatattactctttaatatttttaaacttcatacttttttggttattaaaatgaattttttaaatgcaaaaagaacatgttgcattatttattttagaaattcccctctttgtgttggactgcaaattcagtttctctttggattgttcttttttattttatgatttattttatttatttatttatttattttgagacggagtcttgctttgtcgcccaggctggagtgcagtggtgcgatctcaactcactgcaacctccggctcccgggttcaagcgattctcctgcctcagcctcccaagtagctgggattacaggcatgtgccaccacacccagctgattttttgtatctttctttagtagagacagggtttcaccatgttggccaggctggtcttgaactcctgacctcgtgatccgcccacctcggcctcccaaagtgctgggattacagacgtgagccactgtgcccagcctggatctttcacaactaggactgacactgtatgtaaaagttccggaacagtacagaaggtaaacagtttttatgtataacttcaaaaagggaaggaaaaaagagagaaatcctttgacttccacgtgcccatctcaagacattccactcacagatttgaggctctgggttctgggtttggagtttcagtgttaacctgaacagaactgacacacacacataaagatgagtgtaatgtgtaattattattcctcttgctggtcaccaccatcactttcgatttctctttttttgtgtgaatttacttaaaagaaaaaaaaactttttgcaataactatttggagtttaaaaatcaataaaccggccaggtgtggttgcttatgcttgtaatcccagcactttgggaggcagagatgggtgaatcatttgaggtcaggagttcgagaccagcctgaccaacatggtgaaaccccgtctccactaaaaataccaaaaaaattttagctgggtgtggtggcaggtgcttgtaacctccgctactcgggaggctgaagcaggagaatcacttgaacctaggagctgaacaggcagacccagcctgatgcccttgggacctgatcccactgccctcttcctgtgcaccccagctttccactctgttgtgccccaatctgtcaagtttctttttgtctctgatctctgctagggtgattccaatgcctgaccatctgttcttcttcttcaagtcaagggtgaaccctcagccccaccatttcctcttcctccactcctaagtcatcccctaagtgtcctgagggcaataaccggggcgtaaatgccctatgtgtctccagcatgggctctgcatgacttcactagacactgagtcacactggttgaggtcagaggacagaaaatctagcgagagagggactggagcaagaggtggagcgtctgacccttgtggggtggttcagctgctggggctgagcataccggagacctggaaactcaccaggcctgacatttacctttctgctttaatcccaagaaacctatggagattggggatcttccagccgagccaacggcaaagatgaggatttcctggtgccccttggccaaacctcctgctcacctggctgagcctgactcataccagtatgtggacctgtggtgtgggtggcagccacatcactgcggaattgggcttcatccagggttgattttccatggttagatttttcctcataacagtagaggctgttatgaacaatatgacaacaaattagaacacctagcaaaaatgtataaattcctggaaaaatataacctaccgggattgagccgaaaagaaatcaaactcctgaacagaccaattacaagtcagaaattaaatctgtaataaaatatctcctatcacagaaaagtctagattccaatggcttcattgcagaactcaaccaaacgtttaggaagaaataacagcaattcttcctaaactcttcctgaaaattgaagagtacggaattcttccaaattcattttacaagaccaacattatcctgataccaaaaccagagaagcacacacaacaacagaaaactataggccaatatccatgataaacacagatgcaaacattctccacaaaatactagccaaccaaattcagcagtacattaaagtaatcattccccatgaccaagtgggattcaacccagggatgcaagaatgtttccagatacacaaatcaataaaagcaacacactacaccaacagaatgagtacaagaagcatatgatcatctcattaggtgtggaaaaagcatgataaaattcaatagtccttaatggtaaaaactcttaacaaactgtgtatagaaggaatgtagcccaacacagtaaatcaatgtatggcaaacccacagccaacatcatagtgaatagggagaagtacaaagctcttcctctgagatctggaacaaggcaagaatgtccactttcaccacttttattcaatatagtactggaagtcctagccagagtgattaggcaagaagaaataaagggcatccagactggaaagaaggatgtcaaattgtctctgcttgcagaggacacgatcttatgtacagaaaacccctaaagcaccaccaaaaatctcttagaaagaaaacccctaaagcaccaccaaaaaaactcttagaactgatcaacgaattcattaaagatgaaggatacaaaatcaacgtattaaaagcagtaccattcctggacatcaacaacaaattagaaaagaaatcgagaaagcaatcttatatgaaatagctattaaaaaaagaaatgcttcagaataaatttaacaaagaaggtagaagacctctaccaaaacaactataaaatactgaggaaatcaattgaagaagacaccaaaaaatgaaaacatatcccatgttcataattagaaggatcactattgtgaaaatgaccatgttaccaaaagtgatctgcagattcaatgaaattcctatcaaaatatcaatgatatcttcacagaaatagaaaaaataatcctaaaatttatatgaaactacaaaagactctgagtggccaaagcaatcctgagcaaacaaaacaaagctgaaagcatggcataacttgacttcaaaatagactacaaagctatagtaaacaaaacagcatggtacttgcataaaaacagacacatagaccagtgaaactaaatagataactcagaaacacatccagctgtttacaaccaagtgattttcaacaaaggcaccaagaacatttactggtgaatggacagtctcttcagtcaatggtgcctgaaaaactggatatccgtatgccaaaaaaaatgaaactagacccctatctctcattatattgataaaatcaactcgaaatagtttacagacttaaaagctgaaactatgaaactgcttgaagaaaacataggggaaatactacaatactgatctgggcaaagagtgtatagtgaagaacccaaaagcacaggcaacaaaagcaaaaataggataactggattatattaaactaaaaagctattgcacagcaaatgaaacaatcaacagagagaagagacaacttgcagagaagagacaacttgcagaatggccaaaaaaattgtaaactattcattcaacaagggattaagatccagaatacacaagaaactcaaacaattcaatgtcaagaagaaaaactacaagtaatctgatgtaaaaatggataaattagctgaataaacatctctcataagatgacacatacatatggccaacaggtatttttagatgagatctggcacgttcagggtggtatggccatagacaccaacaggtatttttaaaatgctcaacatcactcatcatcaggaaaatgccaatcaaaaccacattcagatatcacctcaccccagttagaatggctactatgaaaaagacaaaagataccaaacgctggtgaggaagcaaagaagagggaactctggtgtgctgttggtgggaatgtaaattagaacagttattatgaaaaacagtatgagggttcctcaaaaactaaaaatagatttaccatatgatcaagaatcccattactgggtacacatccaggcaaaaggaaatcagtatatcaaagagatatctgcactctcatgtttattgcagcactgttcacaatggacaaaacatggaatcgacttaagtgtccatgaacacgtgaacagatgaaaaaaaatgtggtatacatacacaatgaaataggatttagctatgaaaaagaataaaatgctgtcatttgcagcaacatggatgagcttggagtcattgttttaagcaaaagaagccaggtacagaaggatgaatcctatgtgttctcactcacatgtggaagtaaaaaagctgctctcatagaagaagagtgtagaataatggttacttgaggcaggaagtagttgggggaggtgggactatagccaaaagttgatggatggatacaaaagtgcagctagataggaagactaacttctagtgttctataggattgtagggtgagtgtaatatacaatttattgtatattttcaaatacctagaagagcagatactgcatgttcccaatacgaagtaatgatcaatgtttgaggaggtgtatatgctaatcaccctgctttggtcattacacattgtatgcatgtattgaaataccactgtaacccataaatatatacaattattactgcatccatttaaaataataataaaagcaaaagaagaaaagaaaaaaagctacagtctaatatccacaattaaatcttcaataacatagtagaaaaccaagttcaacacacattaacagaattatacaatatgaccaagtagactttatccctgaaataaaagaatagttcaacacatgccaatgaatcaatatgacattccacattaacaaaataaagaataaaaaccacaggatcaccttaaaagatgcagagaaagcacttgataatattcaatatccattcatactgaaaccatcaccaaaatagatactgaaggaacttacctcaacacaaatatggtaatatataaaaacccactgctaacatcataatcaataaagagaaattgaaatcatttcctctaagatcaggaacaagatgaggatgcctactcgtaccactcgtatttaacatggtactggaagtcccacccagagcaacgaggcaagaaaaaaaaagccatctaaatcagaaaaaaaagaagtaaaactttatctcttagaagatcacatgatgttggttgtgagatgtgttcattattttgattattatggtagttgttctgatttttacaagtgtcaaaagttacaaattatatactttagacaaacatacttgttatatgtaaaatatatttcaataaagctattaaaacaaaaaaattaatttaataaacatatacaagattttaaaataaaattagaatcaacttaataggttaatgaagagagaaacatcaaaaagaaacatttagttaatactttaaatgatactatttaaagctcaacttccccaaaactcaactgtttatgtaaagctaatgagagaccatcaggctaggatagaggagccttaatttggccaaagtacaaacaaaagttacaaattatacactttagataaacatacttgttacaggtcaattatatgttaataaagctattaaaacaaaaaattaaatttaacaaacatattaaataattgccagcaattattctggcagtcacacagatatgcaacttctccagttacttctgcagataccatcactattttagaacctgagattggccttttgagaagtcttttcaggtttttttgtatgtctaacaccaatggctccacctagattcaccagctgttcctgtggccccacccagaaggaactgcatgcaaaaagacagcttcaactctctatgaattcatctccaatccaagaaatcagcactccacataccctagcccccagcccaccaagagtctttgaaaaacccctagcctctgggccttcaatgagatcactttgatgttaactctgtttcccccatggcatggccagcctcccatcaattaaaccctctgcaatgccacggtctccctgaattgatttgtttgtgcagcaggcaggaagaatccttcgggcacttacaccactccaatcttatgtaaattcttccaaagaataaacaatgagggtacattctctgtaccaatcagtgtccctgcaggaaggaaatggcacactcatgcaggacataggacaagagtttaatgaatggctgtaaacaaaaaataaaattctaaggcccccaaccatctgaatggacccctcctcttggccaatggcattccaaagttaacctgaaaaactagttcaggtgaagatggaaggaggagtcagacctgcctcattatacccaattcccttttggaattcaggaaaagctgaccaaggtttaacatcaacacagaccttaagtctgataagaaacatttacaaatctattcgttctgaagcctgctacctggaggcttaatctgcaggataaaaccttggtctccacaaacccttaccacaacccaggcattcctttttattgacaataactctttgaaccaattgccaatcagaaaaattttaaaactacctaagacctggatgcccccccaaccccacttcaagttgtcctcttgcccttccagatggaaccaatgtaaatcttacacgcactgattgatgtattatgtctccctaaagtgtgtaagagcaagctgtactctgaccaccttgggcacatgtcatcaggacctcctgaatctatgtcatgggcagatccttagccttcgaaaaatattttctaagttgattgagacctctctcagataccttctggttcacaggcttatggctgtgctgtgagcaaagttaagggaaaccaataagaaaagtgagaaacccaaggcaagcaagagcaacatatctaacgagaggcaaggaaaaggagccatttctacaatccagtaagacatgtaactgcaggagaggccaaggtcacaggaggaatgcagccactgccaaactgtagccctgaaaaaaaccaaagggcaacattgcccaacaatgcaatccagaaaagatcaggtcctggggtacaaagcaggctatggaatgaagactaaccctgttggaataaatatacatcacctctacatcccccaattcataatgagctggtatcatgttgacaccaaaatccaaccactcaaggacatagacaaaatgttctatgcaagatattggcaaagtgaatgaaattacatataaagaaaactatatgctgattaaggaggatttacaccagcaacgcacggtaggtttcaaattacaaaattatttgatgtaatttaacacattcagagcctaagggaaaaaactgtatgcatatttcattaaatgcaagtgagatatgttataaaattcatcttttcttgatttaaaaaattcctttacagagggtgcagtggctcatgcctatagttccagcacgctgggaggccgaggtgggcagatcacttgagccaggagttcaagaccatgttgggcaatatggcaaaatgttgtctctacaaaaattacaaaaattagccagatgtggtggcacccacctaaaatcccagctactcgggaggctgaggtgggaggatcgcttaagcccaggaggatgaggctgcagtgagccatgactgcaccactgcacttcagcccaggtaacaaagcacaaccttgtctcaaagaaaatttaaaaattctcttagaaaatagaagtagcataatatatcttaatctaatgaagaccacctacgaaaaaaatctgatgttaaacttcttatgtaatggtgaaatatcaaaagctatcctttagaatctgaacgaagggtaaccagaaatacttttaaaatgttgtataactttcttataagcctaaaattatgtgaaatttaacaatttatgtaagataaaatgctatcaagagcaaaagaaagaaacaagcaaaaaagaaattcatcttgagttcagatactaaacaaaaatgcctactttcaccattgctatctaacattgtactagagattctacaagtggaataaagcaagacaagtaaaatatatgaagattgaggaggaaaaagcaaatatgcattagatatatttatataaataatcttagagcatctacagagaatatattaaagagtttttgaatgctgaatacgaaacaatatagaataattatacttttctatatggcagcacgaacatttataaactgacactttaagagaatgcaatatttacagtggcattaaaaagaacagataccttggaataaatcaattaatacatgtataagagcaccatagaaatacatatgtattaccaacattaaccttaaatgtaaatgggctaaatgctccaattaaaacatagactggcaaattggataaagagtcaagacccatcagtgtgctgtattcaggagacccatctcatgtgaaaagatgcacataggctcaaaataaagggatggaggaagatctaccaagcaaatggaaagcaaaaaaaagcaggggttgcaatcctagtctctgataaaacacactttaaaccaacaaagatcaaaagagacaaagaaggccactacataatggtaaagggatcaattcaacaagaagagctaactatcctaaatatatatgcacccaatgcaggagcacccagactcataaagcaagtccttagagacctacaaagagacttagactcccacaccataataatgggagactttaacaccccactgtcagtattagatcaatggagagaagattaacaaggatatccaggacttgaactcagctctgcaccaagcggacctaatagacatctacagaaatctacactccaaatcaacagaatatacattcttctcagcaccacatcgcacttattctaaaattgaccacataattggaagcaaaacactcctcagcaaaggtaaaagaacagaaatcacaacaaactgtctctcagaccaaagtgcaatcaaattagaactcaggattaagaaactcactcaaaactgcacaaatacatggaaactgaacaacctgctactgaatgactactgggtaaataacaaaattaaggcaaaaataaagatcttctttgaaaccaatgagaacaaagagacaacataccagaatctctgggacacatttaaagcagtgtgtagagggaaatttatagcactaaatgcccacaagagaaaggaggagagatctaaaatcgacaccctaacatcacaattaaaagaacgagagattcaagagcaaacaaattcaaagactagcagaatgcaagaaataactaagatcagagcagaactgaaggagatagagatacaaaaaaacccttcaaaaaaaatcaatgaatccaggagctggttttttgacaagatcaacaaaatagatagactgctagcaagactaataaacaagaaaagagagaagaatcaaatagatgcaataaaaaaatgataaaggggatatcaccactgatcccacagaaatataaactaccatcagagaacactataaacacctctacacaaataaactagtaaatctagaagaaatggataaattcctggacacatacgctctcccaagactaaaccaggaagaagttgaatctctgaatagaccaataacaggttctgaaattgaggcaataattaatagtctgccaaccaaaaaaagtccaggatcagatggattcacagccgaattctaccagaggtacaaagaggagctggtaccattccttctgaaactattccaatcaacagaaaaagagggaatcctccctaactcagtttatgaggccagcatcatcctgataccaaagcctggcagagacacaacaacaacaacaacaacaacaaaaaaaaaaaaaaaaaaaaaagagagagaattttaggccaatatccctgatgaacatccatgcgaaaatcctcaataaaatactggcaaaccgaatccagcagcacatcaaaaaagcttatccaccatgatcaagttggcttcatccctgggatgcaaggctggttcaacatacacaaatcaataaacgtaatccatcacataaacagaaccaatgacaaaaaccacatgattatctcaatggatgcagaaaaggccttcgatgaaattcatcagcctttcatcctaaaaactctcaataaactaggtattgatgggacgtatctcaaaatgataagagctacttatgataaacccacagccagtatcatactgaatgggcaaaaactggaagcattccctttgaaaaccagcacaagagaaggatgccctctctcaccactcctattcaacacagtgttggaagttctggccagggcaataaggcaagagaaagaaagaaagggtattcaattaggaaaagaggagtcaaattgtccctgtttgcagatgacatgattttatatttagaaaacctcatcgtttcagccaaaatctccttaagctgataagcaacttcagcaaagtctcaggatacaaaatcagtgtgcaaaaatcacaagcattcctatacaccaataatagacaaacggagagccaaatcatgagtgagctcccattcacaattactacaaagagaataaaatacctaggaatccaacttacaagggatgtgaaggatgtcttcaaggagaactacaaagcactgctcagtgaaataaaagaggacacaaacaaatggaagaacattccatgctcatgggtaggaagaatcaatatcgtgaaaatggccatactgcccaaggtaatttatagattcaatgctatccccatcaaactaccaatgactttcttcacagaattggaaaaaactactttaaagttcatatggaacaaaaaaagagcctgcatagccaggaaaatcctaaataaaaagaacaaagatggaggcatcatgctacctgactttatactacaatgctacagtaaccaaaatagcatggtactggtagcaaaacagatatatagaccaatggaacagaacagagccctcagaaataacaccacatgtctacaaccatctgatctttgacaaacctgacaaaaacaagcaacagggaaaggattccctatttaataaatggtgctgggaaaactggctagccatatgtagaaagctcaaactggatcccttccttacaccttatacaaaaattaactcaagatggattaaagacttaaatgtaagacctaacaccataaaaaccctagaagaaaacctaggcaataccattcaggacctaggcatgggcaaagactttatgactgaaacaccaaaagcaatggcaacaaaagccaaaatagacaaatgggatctaattgaactaaagagcttctgcacagcaaaagaaactatcatcagagtgaacaagcaacctacagaattggagaaaattttcgtaatctacccatctgacaaagggctaatatccagaatctacaaagaacttaaacaaatttacaagaaaaaagcaaacaaccccatcaaaaagtgggcaaaggatatgaccagacacttctcaaaagaagacatttatgcagccaacagatatatgaaaaaatgctcatcatcactggtcatcagagaaatgcaaatcaaaaccacagtgagataccagttagaatggcgatcattaaaaatcaggaaacaacagatgttggagaggatgtggagaaataggaatgcttttacattgttggttgaagagtaaattagttcaaccattgtggaagacagtgtggcgattcctcaaggatctagaactagaaataccatttgacccagcgatccctttactgggtatatacccaaagaattataaatcactctactataaagacacatgtacacatatgtttattgcagcactattcacaatagcaaagacttggaaccaacccaaatgtccatcaatgatagaatggattaagaaaatgtggcacatatacaccatggaatactatgcagccataagaatggatgagtgcatgtcctttgcagggacatggatgaagctggaaaccatcattctcagcaaattatcacaaggacagaaagccaaacaccacatattctcactcataggtgggagttgaacaatgagaacacatggacacagggcagggaatatcacatgtcggggcctgtcgggggtggggggctggggtagggataccattaggagaaatacttaatgtaggcgatgagttgatgggtgcagtaaaccaacatggcacatgtatacctatgtaacaaacctgcatgttatgcacatgtaccctagaactcaaagtataataaaaaaataaataaataaacgtgcaatgacattaaaaaaaagaaatacatatgtaaaaaattattgtgataaaataagggagaccaaaataaatggcaacatgtaccagtgttatggagaggaatattcaatattatcaaaatttcagttctctccaaattgaattcaaaaagctgtttctaaacatctggcactgtagagggccaaaaccagcaaagacattctaggaacaaggccaaagtagaaggactccctctgccagagtcaagaactaagtaaagctttagtgtgtactcaacgcagtgccacactggcatagagacagacaaagagaccagcgacatgaaatagggaacccagaagcaaactatgtccctctatggggcacttggttgttgacaaaagggacactgagaataatggaataagggccatcttctcttaaaccaagcttgtccaacctgcggcctgcaggccccatgcagcccaggacagctttgaatgtggcccaacacaaatttgtaaactttttaaaaacattatgagtttttctgtgatttttttttttagctcattagctattgttagtgttagtgtatttttttttaatttaatttaatttttttgagatggagtcttgctctgtcaccaggctggagtgcagtggcctgatctcggctcatcgtaacctctgcctcccaggttcaagcaattctcctgcctcagcctcccaagtagctaggactacatgtgtgtgccaccactccaagctaatttttttgtatttttagtggagaggagctttcaccatgttggccagaatggtcttaatctcttgatctcgtaatccacctgccttggcctcccaaagtgctgggattacaggtgtgagccaccgcgccgggccatgttagtgtattttatgtgtgacccaaaacaattcttcttctttcagtgtggcccgtggaagccaaaagattacacaaccctgtcctaaactgggacagcagggaatctatataattaaaaagaaagggagttcttacccacacttcacgtaaaagtccattccatgtactttagagacctcaatgggcaatccaaaacaataaagactttacaaatctttatgtagaagaatatctttatgaccatgacatgagaatcttttttccaaaggaataaaaccatattaaaaataacaataaagagataaaaatgttttttaaacaacacacacacacacacacacacacaacatgaagcataaagtataacattgataaatttaattatattaaactttaaacttctgctcattaaaaaccataaggaaaatacaaagctgatccacagtgttggggaacacatttcccacaaataaccaaacaagggctcttatcaagaaaatataaagaactcctttagcacattgggaggccaaggcacaggagttcaagaccagcctgggcaacatggtgaaatccgtctctactgaaaatacaaaaattagccaggcacagtggtatgtgcctgtagttccagctactcaggaggctgaaacaggaggatcgcttgagctcaggaggttgaggctgcagtgaaccgagatcatgccactgtactttagcctgggcggctgagagagaccctgtctccaaaaaaacaaacaaacaaacaaacaaacaaaaaaaaacaataaaagtgcggaaaaagccttctactcacatttcactaaatgactgataaacatatgaagaggcctcaacctcattacaccacaaaatgcaaatggaaacccaatgagatgccgacgcccctgacacctgcctaccagatggttcacacgacactgacaatgccaccttgtggcgatctagagcagtaggaaatactacagtgtggctgggggtgtgcattgtacaactgcttcaaaggtttcctgtttcctagaacagtcaagaatatgaatatcttatcacctaaaattccacacatgggcacaaaccctaacaaatgtgaatgtaaatgtgtgccaggacatccacacataaaagctccctatagtgttgttcatgataatagaatcagtacacaatggcagattttttaaaccataaagacagcaatgtggattgatagcaacagcaatgttgaacaaaaaagtaagatacaggagaacacacacgatgactacggccataaaaattataaaaagccaaaattaatgtttactgtatgtgcagatgttcaggtagcaaaaccatccactaaaataacagaaaaccacaaagtcaggacaggggtcaactctaggcagtgaggctggtgccgggaggagctcaccatgacctttcttcaactgcaggggtattgtgaggtttgcatcacagacatcacttaagatacagtttatatggtgtgtcctagtctgtatttgtgtcatatgtcacaatagaaagatgagaggccatgggaggagggaaagggagaaagggaaagtgaaggggaggataaatgaataaagaaaaagagacaagaagatggagatgcagaggggaaagagagaaagaacagggcagggaggaagagacaggagaggactggggggaagagacaatggggagaaggagggagtgtgagctgcacccgtgtaacctgcctgccccagctcctccacagccgggttgtcctccccgcccaccccacccctcccccatgggacacctctgctaagggactactccccactcagcacgctgttgacctccagcccctatccagaaagtctcatctcccaaaaccctgcccacaaccctaaggtgaacccacagttgagggagctcctcccctagtgtcaacctggctcccacctcccagtgcgggagaaaagcaaagcagttgagctgggaggctttggggacaggccattctccaggagccagcctggccacagggccaacggtccctggcagagaacgacagggctcaataagcagaggccatgcaggccccaaggccagactacagtgggagccagtgtggccaggtgcccagaaatcccaacagcaccactgggtcccttagaagatgctcaagttcccaaaactgggggttagaggcaggggattagtcagacctcaccttggacagcagccccagccctgcccagggacaccagggcatgagggtgtcacaagcaagtaggtggctcaaggccaggtgcctgtgccttggctgagggacgtggctcaggtcagtttgctccatgactccctgggtcccacagaccccactccacgctctactgcagcccagtgcactgcatggtgctctgctgtgccaggttgtgttgtgtccagttgtgctgtgttgtgtgctgtgtcactgttccagcaaactccttgtccggaagctctagggccccggccactgagaagccctagccctgagtcagcctcaggcaaggcctgcatccctgctgcctccctttccctggctcagccttgcagctcccgctgacccctctgccactcacccacccatcacccccacttagaggccaggaagcagcgggagctgtatctccctcccaaccaccccctcccctctttcttcatcctccaggacatgcatttctaacagaaaccagaaatcctgcaaatgccctgacccatccactgaccccagggcacctcctgcccaggtgtttggcacaggggacgcccccacaccggccccatcatgtacctggtggccccaaggctgcagcacgggatgcctttctgaccctggacctgccctgggccctgctctctgccaccgctcacaggacaaacccaaacaattgctgtcctccctctgaaatggtggccatgagagtgcaggccttgcgtccctcctgtgcccaggcccctcacccacacactctggctggctgcatctgttgtccagagcccttggtcacaaggcgtgcagcctggaccacagtgatgacaagggaggcccttcctaagcctagagatggtctaaaccttcatggaactgctggtcccagtgccagccagagtcccaagtgaggctgaggtggctcaaagtggtgcacgggagatgtctgatatcaaccctctcctggaggtagatgatgtctccagcctggtgactccctggccaccagccaccaccatcccccatgtccccaaggctgaaagtgcaagcttgccctggccctggcacagaaagtgcacgatctggtcatgtcatgcaggtgacctcatgcgggcatggtggcacttgtggggcagtcctgtaacctgcagtgtggtgggtgggatggatgtgtgtgacacaggcaggaactacccctcatggcagttgagggcccacgtgtgtattgggtggggctgatgggagtgagaggtgagtggctgggcacaggcaggtgagtgagtgacagctacacaaaccccaccactgagcatgtccctcccaggacaaagcaggtcagagccacaggcccagccctgggaggcccagaggggcctcaggtcctcagggacctggccctcttggccctcagaggaccccactccctctagaaagccccccagctggctccacctgtagctgtgcaagtgggaaggggacacagtgctctggggtccagagaaggaaggaagatggagggagggcggccctctgctcccaggtcctctgttccctgaccctgatgctcagccccctgcggccctcctggagcccacacctttcagctgcagtctcccagcctctctccccaggacgaagcccactcagccagtgcttttccactgtagctggcttttccccttggggagggtccccagattgtacaaagtgcagaggggtcccctgtccctgtcccacagggtccccacaccaggctttctcaatgtctccctgtctctctcagacaaggagggcagaggcagccacaaggccggtcccagccacaatcacacccgcatattcagataatcacagacgcttgtcccacacagtcacacaccccaacctcaggtaccaaacaccccacacactcccgacagcgcattctactcacacacacacaatcccattctcacacatgtgcacccaagcctctcgccccacatacaatgtgacaggccactgggccacctgcgggtcccagtgcacatggatgcctgcagtgcacagccacctagatcctgcaccaccggacaggaagggggcgggtacctggcagatgccacctgctgcgcccactgggccaccagaaactccacctctccccgactctccaggtcccagccaagccacgcccaccgggcctgcccccaggaccctgagtttaaagaccccatctccccaaatgccagagggagaggattccgcaccaccccaagtgtaacccacaccctagtcggccctgaccccgcactgcatggcgcccacctgagccctggcgttgctgggcctcctgctgctgctgttgctcgtgggtaggccctgccaggagaccctgggctgcgctgcagccctggggtacccacccctccctgctcacgtgctcctactctccctgcagatcccaagaaactatgcccgcagctcgtgaccgtcatgaaccagtttctgaccgaggacaaggacacctacatggattctgtcaacagatatcatcccacggagctggaaagaaacacaccctccaaactcaaggacatggtgaccaacaccacgacccccgaggagggacaggccgtcatgcagcaggcccggccaccagcgcctcctcacagcccttgacctcctttgagatcagggactctgttccctgagagcctctctctccacccaaacacttccccacctctcaccaagcaatgtccctgcagacgggcagctgcccagggaaaagacctcagggcgctgggtctccgccctctgatactcaacctctgctgtcaaccccatcctatccctccttcccagaagacccctcccttcagcctcccacccctccccacaggaagaaatcaacaaccagggtgcctacacggtactgaagtgacaccatccacaggcacctcgaatctctgcccaggcagcctgtccggcccaggagaacctgggcccggggccccaccctccccagctcctgccctgctgctgcccctcctcccactcctgctgtgctaattggggctgattgcgggccactactttatttacatagggtgtacaccaagtaaccaatgggaagcctctagagggtatttagaccccaggaaattctaaatgggctcttgagcccttatgcttgggcctgctcccggtttggagtgtactttcactttcagttaagtctctgcttttgttgcttaattctttctttgctttgtttgtgcgttttccccaattctttgttcaaaacagcaagaacctggagaccctcctcctgtaacgggaaggtgggatggggggagcccaccctgacactgacccgggccacccacgtgcccctccccccacacccatactcactagggccctgggtggagcttcccctgctgctcacagctcggtgagtggccaggccagcaagctcccccagctgcgcccctctgctgattttgcccctggtcacccttaccaatcagggtccagtcaggtgacagaagtcacaggcaagtggcttcaacacccacatatgtagtgagaggtgacagcatgctggcggccctcgcagccctcgctctctctcggcgcctcctctgcctgggctcccactttggcggcacttaaggggcccttcagcccagcgctgcactgtgggagcccctttctgggctggccaaggcgggagccggctccctcagcttgcagggaggtctggagggagaggcgcgagcgggaaccggggctgagcgtggcgcttgcgagccagctggagttcccggtgggcgtgggcttggcgggccccgcactccgagctgccggccggccctgcctgcccgggcagtgaggggcttagcacctgggccagcaactgctgtgctcaatttctcgccgggccttagctgccttccggcggggcagggctcggtacctgcagcctgccaggcctgagcctctccccctcctctgtgggctcctgtgcagcctccgagacgagcgccgccccctgctccatagcgcccagtcccatcgaccacccaagggctgaggagtgctggtgcacggcgcgggactggcaggcagctccacctgtggccccggtgcgggatccactgggtgaagccacctgggctcctgagtctggtggggacttggagaacctttatgtctagctaacggattgtaaatacaccagtcagcaccctgtgtctagctcagggtttgtgaatgcaccaatcgacactctgtatctagctactctggtggggacttggagaacctttgtgtccacactctgtatctagctaatctagtggggacgtggagaacctttgtgtctagctcagggattgtaaacgcaccaatcagcaccctgtggaaacagacggctcggctctctgtaaaatggaccaatcaccaggatgtgggtggggccagataagagagtaaaagcaggctgccccagccagcagtggcaaccagctggggtccccttccacactgtggaagctttgttcttttgctctttacaataaatcttgctactgctcactctttgggtccacactgcctttatgagctgtaacactcaccatgaaagtctgcagcttcactcctgaagccagcgagaccacgaacccaccaggaggaactaacaactccagacgcgccgccttaagaactgtaacactcactgcgagggtccgcgacttcattcttgaagtcagtgagaccaagaacccaccaattccagacacagtagcatctcttcactgtgtaacatgtgttcctaatgcactttctatatctcacttcctttaggttctgtgttttattccaggtaatgttccttgaatctaaattacaatttactaattttcacgaaagctgcacctaatctgctacccattcagacaaacaaactcatttatcaaatgtttgttgaaccggcactcggtggcagattctgtgctagggcgtgccaagtgcagacacatgtttgccaagacacaccgttatgcctcagggcctcctgggtgcacatgcacacatggacctgcaggctggcaccatagtgctcagcctgctcccaatcccacggtgctccagggaggacacaggatgtcacagcaacacccaacccatcccactgcatgctgagcttagttcctgatacactgtcaccccaaaggcatggcccagggccgtgggtctctctgcagacctgccctgcccccacttacacacacacacacacgaagaggtgtgtctcatttccacctgtgggattctaatttatggcagtgactgagtgaccacacagagaggccaatgcgatggaaaacattattatttacatttcccggggcacaccatgccacacagggccacatggagagcaccagtgctggtcaggaggcaggagcaaggggaacccataggccacagcctttattggggttcccatgggaaaagccaggcagggcagagtaaacagcttatgattagctagtttgaataatcccggcaggctttggcctatagtgttggtctctggttacctggtacctggtcatggggtgcttcagtgcaggggagatattggcgtggggtgtgagagttggataaagaggtaatcggggctatagattcagtgccagttggttgtatatgagacaggtgctccaggtcgagcgttttgccatctctaagaaaagactaatcctgggaggacagtctccagagccagcaaactttaaaagatgtcatcataaaatacagaaaataaaaagcataattacaccaagtcgcagagtaagtggatgtttaccttttcacaaactgactaactgtgttccaaagtggttatactactacattcttaccacagtgttatgaggatttcaggtactccatatcctcaccaacacttggtatggtcagtctttaattttcactattcccgtttggtgtgcagtggtatttctctgcgattttactttgtatctccctaataactaatgtttacaatttttatgtgtactactgccatccctctatcttctttggttaggtgtctattcaaatcttttgcccatttaaacttttttctttattattgagttttgagagttcttaataaataatgaatacaagtccttcttcagatatgtggtttgccagtatagtcttctagcctatggctcttttcttccttcatcttaaaagagcatgtcgcatagcagaaatgtttactgttgacaaagttgaatgtgttatttttttctttgattgaacatgtttttggtgtatatttcagaagtatttgccaagattttaaaaattctctcatgttacttaatgaaggtttcatatattcaggtttataatccatgctgagttagttcttgaatattgtataccgtgtgaggtttgggatcagaactttgtggctggtttgtttgttttgagatggagtctttctctgtcacccaggctggagtgcagtggtgcaatcttggctcacttcaacctccgcctcccgggttcaagcagttctctgcctcagcctcccaagtagctgggattacaggcaccacccctggctaagttttgtatttttagtagagatggggttttaacattttggccaggctggtcttgaactcctgacctcatgatacacccaccttggcctcccaaagtgctgggattaagggctgagctactgcagctggcctggtttttgttttaatatggatgtccagttgttccaacaacacttgttgaaaacacgatcttcagtgaattgcctttgcacctttctaaaacatcatttgatcttctaagtgttggtctatttctggactttcttaatctatatttttgctaacattttaaagtcttaattaactttataatatgtctttaaatcaggcaatgtaatcgtttaactttatgcatctttttcttttttttttgctattctaagtgctttgtattttcatatcaattttagaattcacttgttattttctaataaaagcatcgtgggattttgattggattgcattgaatatatgtttatcaatttgagaagaattagcacattaacaatattgagtgttctaatccataaacattgtgtatctctccttttatttagatctttaattttcctcagcaatcttttgtagttttcaatgtacatatcttgcacatcttatgtgtctcaagtatatgttgtatgctcttgtaaaaagtgcttttaaatttcagtttcaaattgatcattgtatacagaagtataatttttttaaaaaattattatttaccctgtaaattttataaattcatttattccagatttttttcacagattctatgggattttctccattaatatttatgttgtctaacttatttgttcaattttatgtgtttattttcaaactggcaactgtgaaatgtattggaagattattcataaaattccttattactgttttagaatctgtaaaagctggttgtggtggtgcactcccatattccaaactaccttggaggctgaagcgagtgaactgcttgagcccaggagttcaagacttcagtgagccatgatggggccaatgcactccaggtggggtgtaaaaataaataattaaatgaataaatgaataaataaataaataaactatgtagtatctagtgatgtcatctcatctgtaacttatcggtaatttgttttttctcacattttttttttttgctagatccacagagttatatcccttttattgatctcaaaaaatctgtattggttttactcgtttttctctattgctattctgttttccacatcattaatttctctctgatctttactatttccttcttgttttgagtttcaattgtcttttttcaagtttttaaggttgaatctgtcattgatttgagatagttctttcttgatacaggcatttaatctacaaatttagcagcatctacaatttattttgtatgttgtgctgtcgtgtaataagatagtggcctagtgtagctctagtcttatctgtggagattcctgggtatccatctttatcccttggtcaagataaattagtgggatttataatgagctcattaaaatctaaaattcctcatagtcccaagggccgatgtgtctaccaatggcttttgctgtggtctgaatatttgtatccccccaaaattcctatgttgaaacctaatcatcaatatgggactcatttgaacctaaacttccaccaaaacacaaacctgaaactttgtctcccttcatacacgacaccttcttccataacctcacatggcaaaaggagcaaacaagcttgggcctcttttataaggacatcaatccattcataagaactccagcctcataacttaacatttcctcaaaggcctcacctcttaatattgtcacactggggattcggtttcagcatatgaattctgtggcgggggcgggggacagacattcacatcatagcacaccctgaatcttaaacagcttctgcatcagagtaaactggcttttcttctccaaagttcatattctaaaatgtgcccttgaccagataaatcccaacagcaaaaattactgattgtaaacactgcattattttaaataggaaagggacagaaggcagctaagagctagtggaagggagtgggttgagtattgcatgtaatgtgttttagtttctccttattgctctctctctctgcttcattttctttctcaagtgtctggcatatttgtttaaatcagacttgcttatgcctatgattctctctacctcacacccctgatttctgttcctcagtctctattccagtgcctctaacctttctgctaacaatgcaagtcagggtgtcactggaaaaggggtctcgatccagaccccaagagggttcttggatcttgttcaggaaggaatttaagatgtgtcgcagagtgcagtgaaagatgcaagtttattagaagctacaccattagtgagcaggaggccctcagaaaacaagaggaggaatgcactggctttaagtttttcttatataggggtcttatctatgaaaaaactaagctaagctgggtctatgtgtgggtgagcaggcagaataaaaaaaattattacagtattcatttaaactaacctggacattccagtgtgtaagtacatcaaaacatagctattatcttcaaagcatatattgttacgggtattgggacatctggactctgcactgttgtaggagtgtccctgtaggtatctttaggctgtttcctcaactataaacaccccatgactatgggccatgaccgacaaggaatgtgctttgctagtctcaaaatggaactatacttaaaatggcatcctctggctctcttatactcctgcttccctaacgatggggcattcacaagttaggggtttaacttcacaggaatgctttttatgagatggccagacatagctattgaaacaaaaggactagccctccatttaaagttcttctcacctatgccctgagtcacatctagtcctttaatgttggccctctctccactcatgaacttaactcatattccaaatatctgaggactcataatgggaaaccaccataattcttccagtgagatcatgaggaaaagcagaaacaatgaaaaatccctatgtaagcttttctggatggactgagcagggactttatgtcttaagtgtggtttaaagtggttccaaagtggcagggatcctggtcttgtctgaaaggaaattatataatctctagaagagaaaggcactttcatctaaggatatgggaaagctacatgaaatctcttttcaaggacaaagataaccaacaaaaaaggaagcaaagcaaactgattgaagaatttggaaataaacatccaaacgggcccacaaaatcttcagttattgttattatcagatacatattatgaagcaactatacctaccatgttaaaaaagtttggaaaattgaaattaaaatgtcctggagagataattatgaatgggcaatagatcggaataaattatccagaatgcaacacagagattgaaggatgaaaatcacagagaatttaagacacctggaggatagaggggtaacacctgcctcataacgaattggggttctcaaagcagagaaacaatggtgaagaggcaatatatgggagaggaagagtttgctgattaccagagatgacacatcacagattcaagttgttcagcaaatcccaagcaggaaagaatttaagaatttcataaccagaaacattatgccaaactccagaaaacacattcagttactatttcagttgaaagcccaggattctaagtgggaaacgatcttaataacctagtcactgcactatctcactatctccttaaacctcattttttcctatgtctcttgcattttaatattaaaaaggtcatcattccaaaagaacttgaccaaaagacctgcaattctcagagaagggaatactaagaccaatagacattcaaaaagattctcaatctcattaacaattaaaaaatgcaactttaagccacagtgagttactatttcacacctagtagattattaaacttttaaagtttcacaaagagagtgttggcagtaagagttggcaagcaaaataaccataaactctggtaggagtgaaaattggtacaactttggaaaacaattcatgattgtatagtaaaatcatagatggaaacatgctttgcacaatccagtctttccttattacatactctaagccttgagaggaagccagctgatgccagtgttttttaaaactgtggctgctataggaattcacaaccacacccacaggatacaccaaggtagaactgtcagaggtgtttaaaccagagcgactccatcttgaatagggcctgggtaaaatgaggctgagacctacttcccagacacttaaggcattctaagtcacaggataacattggaagtcggcacaagctacaggtcaggtcataaaggccttgctggttaaacaaattgcagtaaagaagccagccaaaacccaccaaaatcaagatggcgaggagactgacctttggtgtcctcactgctgcttgttatgtgtccggaattggttccttctggtgggttcctggtctggctggcttcaggagtgaagctgcagaccctcgcggtgtgtgttacagctcataaaggcggtgcgtctggagtcgtgctggagttgtttgttcctcccggtgggttcatgatttcgctggcttcaggagtgaagctgcagaccttcacagtgagtgttacagctcctaaagacggcgtgtctggagttgttcgttcctcccagtgggtttgtggtctcgctggcttcaagagtgaagctgcagaccttcagggtgagtgttgcagctcataaaggtagtgcagacccaaagagcaaaagaacaaacatcccacacctgggaagtagaccccagcgcggttgccgctggttgttcgggtggcccgtttttattcccttatttggccccgcccacatcctgctgatttgtccattttacagagcgctgattggtctattttacagagtgctgtttggtccgtttttacagagtgctgactggtgcatttacaaacctttagctagacacagagcactgattggtgtatttacaatccttcagctatacagaaaagttctccaaggccccacctgatccagaagcccagctggcttcacctctcggttatatgctaattatatgcattagcacgctaagagaaacgctcatcagtgccatggcaatttacaaatgccatggtaaggttcagaagttaccctgtatggttcaaaaagctgggaagccctcagctccgagaaattgaaattgcccacctctttcctggaaaactcatgaataatccacccttgtttagcacatcatcaagcaataaatacaagtatccctagtccagcagcccaagctgctgctctaacaatggagtacccattgtttctttactttcttaatacacttgctttggctttgcactgtgctctcccatggattttttcttgcgtgagctctaagaactctctcttggggtcggatccggacccctttctggtaacagaagcactgcttcacgaagatcatgcaggtcagtacttaataagtacaaaaaagtctatagcgacactatttataattttaaaaatgattgaagtcaattaacatttaagtgttaaaaagaaagtaaacaacccaaatatacacaaacagtagactgctctggcttgcatacagagaggtccattgcccttttgggtgggcctaagaagcacttctggggagagggggcgtcaggctgtgatggctgcgggaggagtgactcctcccaggatgagggtctccatcctcccagtgctcactcaagttcagtatttccaagtccttccaggggcgtaacgcacgtcagaacggccattagtgtcacagatacgtgtccccttgcatttccaggaaatgcccttggttggcgaactacagtcgtgacagtcgggccacagggcgttttgtgagttatcgtcttgggcaaatgagtgccaaaaaaaaaaaaaaaaaaagacctgaaggtgaacagcatagcggcagggtttgggatgagaggagcccctttgctagcaacggcgagcacttgcgcggtaccagcaagggctgcccatgtctcggagggaaacgtttgtgtgagcgcaggaatgacccggaagaccttggcacggctgcagttttctgggaaatgtaatttcttggtccgggcgccatggcccttataagtagagggtgtcccttggtttcgagttgtatcgttcaccagaggacgactgtgtgccccaggacaatttgcgcatggtcctagctggccggctctaggtcgacggccccaggcggttaagctacttacaaagccgtgaccggtttgcccgcggcgcaccaggtccgcgcagccgcagagacccttgggaagtgtggtcttcgggtgccggcggttcgcggcttccgggacatttgtaccgcagggggaggattctgggaaatgtggttcgccgtgggcggtgcactgggtcagtcccgcgatagcttcaggcctggcggcggcttccaagctaaggaacggtttggggcagtgtcgttcccggaggtcggccgccgttacccgctcaccagctacgcggcgcgtcaggtccgcggaggcgcgggctcggggcgcctgcgggacggtgaggccctgctgaggactccggcaagtgtgggtcgcggcgacggcggggctaaggccctgggtccgcgcgcggtttgaccacggccggggccttgggcatttcctggccttcctgttgagccgtgtaaacgcggggtgatgacggcgccgacctcttggcactgttgtgagagcgaagtgggcgcgagagcagacgccagctacagttttttttgggttatgtcgtcatgaagccggcgctttcagttgtgcaaccttgaacaaatgggttcagtatctcggaatttcagttttgtcttcattttaaaaaataaatctggtttagaactcgacctcaagcgatccgcccgcctccgccttccgaagtgctgggattaaaggcgtaagccaccgcaccagcctaacgaacatggcgaaacgccgtctctactaaaaatacaaaaaaaaattagctgggcgtggtggcacgtgtctataatcccagctattcgagaggttgaggtaggagaatcgcttcaacccgggaggcagaggttgcagtgagtcgaggtcgctccattgcactccagcctggagacagaacgagactccgtctcaaaaaaaaaaaaaaaaaaatctggaataatatgaatgcacaccttgcaaagtggtgaagactgaacgagctgataaagttgttaccgttgttttatgagtcttttgtatacagaataattgattttccccgcaggtggcacctggtaaatagcccttgcggagaaacaccctgttccttcccagggagagattgacgctccggcgagtgattaccagtgtgcttttccattaaggtgtgtgacaggtgccgcaagataagcccgatttttcatgactgctttttcctgcctttctgtgccctcaggacactgcccatctctaagataagaacctggaaaggggactctgttggccattggaaattgcagaataatgtctcaggtaagtcggtgtgtccccaaatcttcctgaaacactttattaggcctctgtgtgtttgctttgcttctcctgcctgttcccacctaatcaagtccatttaagggactagatctatggttcctttcactataggaagaatggagcccacaggagagctccaaggtattgtcctcatcacccagtgttcctcttttctacagttttctgctagaagactttctagattgccaacattttaaaactgtaattcacaatgcaactttggaatgtaaggttattcggtttatggttgtcaaaactgtaccatgtggtctcaagtgaagagatgtttggagtcatccttgattcttccttttgacttataactcatattcaggtcctctagtttggatctaaacgatacaccgtatacagcatctgaccattagttagcccatcaccaccaccaccactaccaccccagtccgagccacctggattattgcggtagcctcctagctggattcccagcatctgcccttaaccctcatcagtctgttctcagtacagctgtgaccatggtcctattgttatataaattcctgtcattccgcaacctaaaatttttcagtggttctaactgagtcacttctgcaatgacctatttgtacaattaggccattacctccctgatcccaccttccttctctgcctcctcattcctgtgcgctccagcctctgtcaccagttgctgtgccatccacgtggaatattcttcccccacatacgcacaagcttgcatccttatctccttctgtgtttgttccgtggttactttctcagaacagcttccctgaaagcctatttgcaattgcagtcaccttccctagcgcttccactcctccatcactgctttgttgttttccacagtgtgtgtcactcactagctgatgtactgtatgttcagtatatgcacgtgctcattgtctgttcctggtgggaggaatgctttttcttctttgttgactgttatagcgtcagtacccagagtgttacctggcaccaaatggatgcttagtaagtaattgtggagtgaataagatgagtaatgaagaactggtggggcagaatcatggcatggaaggtgaagcttgcacaggaggggatgtaagtagcagatgtacatcttgggtgaagtctgttttcatggaataattaagataattagaattgaaaaactggtgtggtagtgcatgcctgttgtcccagttactcgggaggctgatgaggtaggaagatttcttgagccctctggtgtaagcctgtagtgagctatgattatgtcactgcactccagcttggtgacagagcaagaacctgcctcttgaaagaaaaaacaaagtaaaggctaaagtgaactaatgccaaaaccattcattggttcatcttctaaacacttatgaagtacctgttaggaagagttgtacatggattttggtgtacactgacacacaggacttcatgatctagtgcagtattgtctaagagaactttctgcagtggtggaagtgctgtgcatgtgtactgatcagtacggtagccaacagccccatctgactattgagtacttgaactgtggcttaagcaatggagaaaataaattttaaattttatttaattattttatttttacattttaattaatttaaatgttgtagccaagttggctagtggctcctgtattgaagattgtggcactggtagaaaagtaagaaagcatgggaaatttaaataagtgctaggatagatatcctatgttcttttgggaactgagatgagtgaacatctcaagctgcccaggcaactgaaggggaagaaagaagcatccctggctctaagttgtaatgactggtttgtcaaagatatgagaaatgttatttttatttgggatataggcaattaacacagtggcaactccaattaacaggtgaatttagaagaaattttgtgtagcaaattgaactgtcaaatcttacttgaggataagttattgtttatttggaaaatgtgtgttggattgtatctgcttgcctatataaaaagatgagatttcttcctgtccttttcatctcaatagtggatcgcttgtgaagtgcatcaaggtctgatttagcttattcagtaataaaactgctttctttttttttctacatttgtggagaggattttctgccattggaaggcgattcgaattttaattattttctccaaacctgagaaaagtaaattctgcctttaaaaccaaagatccatgtcactggtgaacatgcatgcaaaatatccaaataaagtaatacaatactgaatgaactctcagagctaaaaaattaccacagtagagcagtctgttttacaaatcacagacagtaataactctgtattaaatggctgtactttttgcacatattataatttgactagccaataagctattattgaatatttaaacttctaaagttttactattttaaataatactgtgaaatgagtactattgagaagaatttctaagcacatctgtgagcatttccttagaatattttctttgaaatctactcttatttttttccccttccaggtcctatttaaggactgtctatggcaggagtcctcaacctttttgacaccagggatcagtttcgtggaagacaatttttccacggaagtgggaggtggtggaggtgatggtttggggatgaaaccgttctacctcagatcatcaggcattagattgacataaggagtgtgcaacttcgatcccttgcatgtgcagttcacagtagggattgcgctcctgtaagaatctatgctatagctgatctgacagcaggtggagctcgggtgataatgctctttcctgccactcacctcctgctgtgttgcccggttcctaaaggccacagaccagtaccagtccgtggcccaggtgttagacccctgatctatgacatgaaaccatccttcagtcttttcacccaggagtctcatattttaattattaaatgtttgtcagcacgaagtttaagtatacaccacaaatatatttttcttttttgtttatgaatcagttatgtgtatgttttagtccatttgtgctgctgtaacaaataccccagactgagtagtttataaataatgaaaattgacttctcatggttttggtgcctgggaagtccaagatcaagaggcaggcatctggcaagggccttcttgctgtgtccttttgtggtggatgggcaaagagacgagagagaggcaaaggggggccagaactcatttttttaaataaggaaccctcttccctgatgatgacattaatccattcatgagggcagagtcctcaaggcccaatagtctcctaaagatctaacctctcaatactattagaatggtgattaagttcaatacatgcttttttggggaacataatcaaaccatatgtctatcagtctttaatattaagatgtcttttttttctgaacccattttttgtgagatttagtgaatctttctgagtatcatatttgagagacaattgctttagccttatttttaattacttagctagcatgtaagctataaaagatataactaaatacttgactctgtgctgtcaaatgtcaaatgttgatttttaaaaattcatataattctaaacttttaacaaaattactgaagcaaagctctcatatttgtctctcattcttattgtataaaaattctaagcacataactgtcccctttattgtataattccaactacataactgtcctattattacttacctgacatcacattcccagtcattgtcacagctcctgaatcttgttccatttcttccacaagcaggctaattttaccccttcttcagtgacagaagaggcctgggctatggctgagcctaaatatatttgctatttcaggtgacatttagtgatgtggctatagacttctctcatgaagagtgggcatgcctagattctgctcagagggacttatacaaggatgtgatggtccagaattatgagaacctggtctctgtaggtaaggatatcaccccttccactccaataggggacacctttcttttgccaccctgaattgctggagattctcctaagtaaatggctgaatttctgtaccatgctcccgaggaaatgtgcagctctgttgtgccctgcctaaagcttatctttccatttcagtgaacacccttcatccattcctgtggtccctcttgtgatggcctctcataatagaggaccacagcttaaacaattctatatttttcctgtaagcaggtctttccgtaactaagccatatgtgatcatgttattggaggatggaaaagagccctggatgatggagaaaaaactgtcaaaaggtatgattccacatgagtcatggtgaacgagacaaaggaagattttgttaaagatgtttatagtgagtgtggaagcattttagggatactgtcttcaaagatctcagatagaaatgaaaaattgagggatatttagcttagattttcaaaacaattgttcctccctctcaaattattatctgtatcactcatgtcacctaatcaaggttagaggtttttgccatcataataattcaaattgttactatattcatgacaaagtaagacaatttattctttcttaattctacttaagaaaaatatactaatagttttaagctaagaaaagctgtcagttagatggaaaatcacttttctaaagctgagctttgtagatgaaatatgaacatattagaggaagtaagggacatataaatgtttctaggaataatattttctaatgttcaagaaaaatatgattcacacagtttcttcataacctcagaaagcctatatctttgtcagctataaagagcatttactttgtttttactgcagttgtttaatatagtagtatcaattctgtattttaagcttgataatccagcagcaaattgagattaatggaaggttggaaaaaaaggctatgaaacaaaatgcaacctttcccacatgaatataggcacaaaatgatgatttgtaatcctgaatgccttccacatcttatttctgatactttccttttttccatactattttatccatttcgtacagcttacccatttcctttatcacactctgttcctgcttctgtgaactttggattctctgctctatttgagcattgttcagaagtcactgaaatatttgagttgtcagaactatgtgttttctgggtgcttcatttcttatccaattctcctaattccactgtagaagcttttttcaagaagtaaaaaaaaaaaaaaaaaaaaaaaaaaaaaaaaaaaaaaaaaaaaaaaaaggcagtgctttgctttcttgatatatttcagattgggaatcaagatgggaaaacaaggaattatcaacaaagaaggatatttatgatgaagattcaccccaaccagtaacaatggaaaaagttgtaaaacaaagttatgaattttcaaattctaataagaatttggaatatacagaatgcgacacatttagaagcacctttcattcaaagtctactctttctgaaccacaaaacaattctgctgaagggaattcacacaaatatgatatattaaagaagaatttatcaaaaaagtcagttataaaaagtgagagaataaatggtggaaagaaacttttaaattctaataaaagtggggcagccttcaaccagagcaaatctcttacccttccccagacttgtaatagagagaaaatctatacatgcagtgaatgtgggaaagcctttggcaaacagtcaatcctcagtcgccactggagaattcatacaggagagaagccctatgaatgtcgtgaatgtgggaagacttttagccatggttcatcccttacacgacatcagataagccatagtggagagaaaccttacaaatgcattgaatgtgggaaggcctttagccatggctcatcacttactaaccatcagagcactcacacgggagagaaaccgtatgaatgtatgaactgtggaaagtcttttagtcgtgtgtcccttctcattcagcatctaagaattcatacgcaagaaaaacgctatgagtgtcgtatatgtggaaaggccttcattcatagttcgtctctcattcaccatcagaaaagccatactggagagaagccttatgaatgtagagaatgtgggaaagctttctgctgtagctcacaccttactcaacatcaaagaattcacagtatgaagaaaaaatatgaatgcaacaaatgtctcaaggtctttagtagcttctcatttcttgttcaacatcagagtattcatactgaagaaaaaccgtttgaagtttagaaatgcaggaaatccttcaaccagcttgaatcactgaatatgcatttgagaaatcacattagattgaaaccctacgaatgcagtatatgtgggaaagcctttagtcataggtcgtccctgcttcaacatcacagtattcatactggagagaaaccttacgaatgtattaaatgtgggaagaccttcagctgtagttcaaaccttactgtacatcagagaattcatactggagaaaagccatataaatgtagtgagtgtgggaaagcttttagcaaaggctcgaatcttactgcccatcaaagagtacataatggagagaaacccaatagtgtggtaagtgtggaaaagcctttagatcatatgaatccctatacatgtgagaaatcttacagaagagaagcagtgtttatcacggtaaacttcattcatagatcctcccttatttaacatcagaaaaatgtatactggggaaaagttgtatgaaggtggtgaacatgggagacttttagcaatgatgcagatttttttattagagtttatactgtagagaaatcatatgaagtcaataaatgtgggaaagcctttgtcagtattaatcccttaattgacctaagtatactcacactaggaaaaatctgtgtacatgtagcaaatgtgggaaagactataggcaataggaatctcctgcaaactcctacaggagaaaagttgtatgaatgtggaaactttagaaattgaaggaatttttcagttccaagtgcatcccttattctataggaaataaactggagacaaatctcatttaagagatgcagcaaagtgttcactaagagtgtttatcttgccagacataagaagatgaatggtagagcaacctgaaggatttagaaattacatataaatctttgcagttatgctatttgtaaacaggattatataggagagcaaataaacataagtatgcatttcttagagcagtagcttgcagtttcagttgagttctacttagaaattctttttagctagtgggcatgtgaagatatttagtcacccagaggagccagtaaatgttataatgttaaaaattaaagctgcaaaagaaataaaatggtgttaataaaaatttggcatctaataaaatcattttgtatatcatgaactctttctctgtgactgtttgcgacaaaaaaaaatttcactaagattagccttagtatagcctttagcgggagactagcaaacttcgagaagaatggcctgctctttatactaagaatagcagtattttggtgaggattattgagtccatatccagtaggcttaattaaatacatttcaagaacatttactgagcattactcatgtgtattacacagggatgggataaaggaatctagtagttctgagctctagtgctgtgtcgaaatcactggaaggacgtgttaaagcacagattgctaagcctcagtcctagagtttctgtatgagttgatttgaatttgcatttttcacacgttcttaggggacactaacactgtttgtccagaatataataataatgttatggtgtcactgacaacatattgtttcctcaatcttacctattaaccatttcttgagcatcttctgtggacttaagaaacactccatactccttaagagcttcgagatgtgtgtgtgtgaagagcattaagctttggagtcttgttacctgggtttaaatccaagttacatgtatactggctttgtgaccttggacaaactgtttcactgggtcatgctgcagtttctccatctgtaaaatggtaataaacctatttcacagcattattatgaaagttaaatgagttaattgatgcacaatgtttacaacaatgcctggcctctcaatagcattcagtaagtattagctatagctattgatttcatcatcatcgtcttctcatggttgcttcattattctggtctcagatgtcacatctaatcacttgccactcttatctgtttactgtttcacatttttgggggagagcatttacaaaacacccccgtttccttccaacaaatcctttagtatctgagccattttgagggaatgtttcttgcccaaaataacctaaggagaaacaaagagaccagataggagatgagatgagaattcagcaggtctctgagaaggaagaaggatgccctacagagttggaaaatgggccgagtgaaggaggcatcaggcttccacatggaggaaaggggagggtttacccactgagaccagaagactacaggtctttggcatcatctctgagtacagagtcccatgggctgggtgccactgccctcactcttcctgaatggaggttacagcctgtcattgaaggtcaccgatgcctggaaagtcagagttttcttgttagccttgggccagtcaaatgtgattagaactcagttgctggtaaacatctagaaagaaccaatgaacatatcactgagcacttcctgggagcttaattctttgctgctgagggggagtcagtttttaaacaaattgcaattgtgttagaggaaaaaagctttatatgcagaagtaattaatggaagatacaagacaatgacaaggccgtgtggcccgtatggcccgagaggtgctgagggtaagcactctggcatcaaagaaatagggaaaaactataatgatcataatacaataccgttaatagcagcagccactgcgccttgtgtttgctttgtgtgctgcattcagacaattaaatgctgtcagctctggacacaaattgctaggtgtgaattcagcctattgggactgtcgcttgcttattctatacacttggggaagtcacttcatttcccgatgtctccatcaaaacaaaaatatttctcatcaggtggttgtgagaattaaaagatatataaagcaagcaacaaagtgcctctgcatggaagtttgttgccgtgtttttcctgctttcaataatcttcccacatactgtaaggtaaatgccataatcatctttgtgctagtgagctgagtgagtctctctcagagtcacacatcttaggaatataggctacatttgaacatttagtaaaagaccacacaatattgcccttctaggacagatctcagaagactgggatttctcttggcaaccataaggctctcttgcctcactgaacaaaaaacatttcctttggccatgccgctccttctgcctagaatgtgtcccataccccatttattaccacgcttacctgccaagggaggcctgcctaccttgcaaagctcactaggtgtgtcaaagacgaacaaagctggacattaatgacagtggtaagaacagactaattgataactattgcaatggggaaaggaatttggcatgaagtcaactaagctttgatttgtacaaaggtaaatgagtatgttaaagggagggtgaagaaatagggggtggtgaggagcggttcagtggagtcagaaaagtgaaaaattaggaagggagggggctggtctatgtgcagtcttatctgggtttgctactggcacttttgagttaggctcatatcctcccacagaggctgggagacaggggccttatcttcaggtgctggctggaagaaattctttggacagccttgagttttttggaaaggcactttaggagtcattagaaaatgttagtgttgttcaagtctcaataggccacagttgacaggcatattcaagaaggctcagaggggcctggatagagtttggtcaaagaaaatctttgtcaggtgtcaccgcaggcttctccagcccactgaggaggaatggtggtgaagacaaaagaacataggcaagggatcaaagtacagggtgtgagtttctgccaagagttgcgtgaccctgagaaggtaacttaagttttccaaatctcaggttccttttctgtaaagcaggaataatagaaactaactctgagaaaattgggattaaatgaagtgctacataatggtgctacataacgagttaccctcagagctcaataaatgtagctattattgttatttagcctctttgctcccacaccaccctggaaaacccaaccaagtcctgatctctacttttgtacgtgtgccacattccctgcacaaagattccagaagatgagaaatacttaacctagaaccagcaaggccgaaaaaaaaaaaaaaagactctcctactaggtgacattggtgcagaacagggaaggatgcaaaggaggagaggagagggagaggcactgcagagatctggactcagtgtcccaggcagagggaaagactgggaagtcggaaagagcttggaatgatcaggacagcttggcaggagagcagtgagcaaaggaagatggagtagaggatgcatttctaggactgtttctctttagaaatagcatccagaatgtccctgaatggtgctgggcactgggaacacacattaaacattagccatctctggtactctcacctagaatgaatgatggttaatatttcccctttaagccttccttaggaaaatggaggtgaaaggtagcaaggtagcttgcacaaggccacagccctgagatagggcacagcacgatccaaacatgtctctggattctgcaggcgatgcctctcctgaggatctgcacatgctgctgtacgtgaatggtggggggtactaagaagttgtagttcatacttccccaccacataccactgatttctagaaagaggaattttctcttgtaatacttgatgtaactctaggactctggacagacagtgaccctatcagcaggaagagaaggcctgaagaatcccaggattccacgatcttccatgtcagtgtgccacagccatgtggttgagagtccaagtatgtgagactgggggatagttaatacaactgtgctaggagggaagcgactatatcagtacttcagactcagctgaactctctcccaggccctgcaaaggtgtctagatgggtcctatccttcttagtggccttcctagcttggtcccaaagagcctcctgcatccactgggtggtgtgggcagacaagtcatgtgacaaatggaagttcacccttgcagtaccaaaagtccagcccatgataatgcaggctgcaggaaacactcctgtcccaggctgtcatttggacatatgaagcacatccttctgggtaatgtagctcttcaccttatctgaggcaatagctaagtagcatccagaggaccactaggaagaagcatcaaaagacttccatgagagtggtacttcacatcagttcgtatgaaccgggctttcttgcatggatagttgttcaatttggtgtttctgtagggaggaggggatgatcactagaggattcttttcaactattttatcctacttcctcccaaaacatgtatttttttctaaacatgtttttgggtctttttaaaaatacgtctgtcttgtcaagtgttcctttactctcttgaacatttcatacaattttaataacttttaatatacttctttcccaattctaccatgtgtgtcatttctgggtctgtttatactggttgattgttctgataataggttatacttttctgcttctttgcctgcctggtaattattttttcaatgcaaaatattgtgaaatttaattttttaggtgctggataactctgcatttctacaaatattcttgagttttgttctgttactcagttaagttatttggaaatagtttaatccattggaaactttttgcaagttttgttaggtggcacaaaggcagccatatgcaaagtgaattttatataatacctttcttgagttatctacttgtctccccatgaataaccagggtattcctctctggctttaggaatacaaagtatttccagccctgtgtaaattccagacattgcttccccctgctcctttcaggtggttgttccctagtcttgggctattttctcacatgcataaacagcagtattcagtgaggacttaacagggactttctgcagaaccgtgaagatctctctgtgcagctctctcctctgtagtctcctgtcctgaaaatgtagccaccttggccaccgtagagtcctaactctgtctcaggagctcagagactgctgattttccctgggattcccccttcctgctttgcagtctggaaattctctgaagggaatctgaggcaattacttggttccttgtttccctctcccagagatcactcttctgtgctgcctgatatccaatttctgaaaattatcatttttgttgagtgttcgatgttctaggtgggagtgtaaatctggcccatgctacaccattgtggccagatacagtaatctttttgtcttgttttgatgtcttatgacattctatttgactacaaacatggggagagtgttatttcttataataaatatcatgccagagtaggcaaagaacgtaatggaattaaggatttcaggagtaactgtggattttggcgggggggggggggcaatatatgcaaatatttattgataatttctaggtggaggatgtttctttaatgactaaattttttcccttatctagcttacatttggtagtggcagagaaataacaaaaaagatagcccaacaaatatgagcatgttagcagagaaagcagggaaaggagggaggcaattggagggcagaaagtgggtagaagagatacagccagagaaactaataatgtggcattggagtggtgtcctgaagaaaggttcggattgagttttcacgtttgaaacatatgttagcattccaggttttgtgctaagtggtaggttcatgaatgactactacattgttaataatcaatcattcattgaagactgaactcaaaacttccctaggggaagagagtttcagaatataagatttgtcacttcctagcatcttcaccattcctctcctctcttttcatttcccaccatttttcatagttctccttgccattccttgtaatatatatttgttcatttgtttgttttccggagacagggtctcagtctgtcacccaggctggagtgcagtgatgcagtcataactcactgcagcctggaactcctgagctcaagcgatcctcccatctcagtctctggagtcactgggaccacaggcatgcaccaccacacctggctaattaaaaaaaaaaatgtagacatggagtcttgctatgttacccaggctggtcttgaagtcctgggctcaagcagtgctcctgccttgatctctcaaagtgctgggattacaggtgtgagccatcatgcccagctcttgtagttttttgatttttatactctacttatcactccaggacagtctttattactcacttcctttgttgttctttgtcacctcctgccaagctcagcttccctgccactcttcctctgtgtccaccaccccctcgctttgcatcattcctccccttcattctctgtgtgggctgtgccccccttccaggctctatattggcatcgcctctagggaagggtttgcccagtttatggtgccagcagcagagtgtgtgagcacttgtttctccacattctgacacattgcttgtcagacattttgtccttgccagtccaatagaagagacaaaaagccatcccaggataaatgttttaatggtgcagagacttattgaattaacctcgattcatgatgtcctccgataaacttcttcattgaaggattattagtaatgtagtagtcattcatgaacctaccacctagcacaaaacctggaatgctaacatatgtttcaaagccactttttttggttgttttctttgaacttttctgctaggaacatttgctccttttcccaccagtatgttggtctttttcttatcatttgtaggagctgtggagggactccatacatactaggaaaataagccaattgtaatatgacttgcaaatatcttcaccataattttctcctaacattttgaatttttttgatgcagttggccatgcataatatttcattttttatgcagtcaaattgatcaatttgggttttttaatctttgcaatggtcttctttcttctgagattctaaaagatattcttctttatttttttcccaagagtttcatgggattttttttcttactctttcaatgtagaaatatttcagagatctgaagttaattttgaagtaggctgtgagaagtagagccaactgtttaattccctcagatgtttaatcagtagattcaacaccactttatttacaaaaaatccagatcgccttgattagcaagttaccttttttcacaaaattttgattatttagatgtatttctgtctttccattgagagttcacttattggtgcatgctcacatgcatatgtgtgttttaaagaatacttcatagggcttcttgtccctaatactctattttaaaattctttctcagcattttcacttatttttctaagtatattatgaatgtcatttaaatgaaccatccaatagtagcattttgagttttgtttctttcattcatcttaatccacgtgagactcttctatgttgttgcatgtgtcaatagtttgttcctcttgtggcttcatggaattcaactgcatgagtgtaacacactttgtgtatccatccaccagttgaacaacatttgagttgtttccagtttcaataaactgaaatctgagtaaaactgttataaatattgctgatcagggttgttgttgttgttgttgttttttgagatggagtctccctctgtcgcccagactggagtgcagtggcgtgatctcggttcactgtaacctctgccacccgggttcaagcgactcttgtgcctcagcctcctgagtagctgagactacaggtgggtgccaccacacccagctaatttttgtatttttagtagagacagggttccaccatattggacaggctggtctcgaactcctgacctcgtgatccacccgccttggcctcccaaagtgggattacaggtgtgagccagtgcccgaccgctgattaggttttttatgtgaacataaatcttcattctcttgggtgaatacttagaagagggattgttgggtcatgataaatggaagattaattttataaggataaagtacatctttttctttaaaataaatctcgttagaagaactcaaacaactccacactaaaaaaaacaaagagacaaataatcccattaaaaattgggctaaggacatgaacaaacatttctcaaaatgtgacacacaaatggccaacaggtgaatgaagaaaatgctgaacaccactaattatcagggaaatgcaaatcagaactgcaatgagatatcatcttaccccagctagaatggctgttattaaacagacaacaaaaataacagatgctagtatggatgtttagaaaagataacacttatacactgttgcctggaatgtaaattagtgtggtcactagggaaaatagtatggtgatttctcaaaaacctaaacaactaaaaatggaagtaccacatgatccagcaattcccctgctggacatttatgcaaaggaaaattaatcagtgtatcaaagagatacctgcactcacatatttattgcagcactattcacaatagcatagatatggaatcaacctaagcattcatcaacagatgaatggataaagaaaatgtggtgtatatacacaatggaatagtatatggccataaaaaagaatgaaatcttatcattcacagcaacgttgatgacatggaggtcattatgctgagtgaaataagccagacacagaaagacatactgcatattctcacttccatgtgggagctaaaaaagttgatcatggaggcagagattacaatgatagatatcagaggctgggaaggggagggaatgaagagagctaggttaatacaggtagataaaatatataagctcattctttgatggcagaatagaatgactataggtaacaacaatgtactgtatattttaaagtatccagaaaaaaggatttgaattgtctcaacacatgaaaataacaaatactcaaaatgatggtgatgtagtttggatgtgtgtcccctccaaatctcatgttgaaatgtgatccccagtgttggaagtggggcctagtgaaggtgttggagtcatggtggtggatccttcttgaatggcttgggaccattcccagtggtaacgcgctcacaggagatctggttgattaaaagagatggggacctccctgctcttggtcccactctcacatgtgacttgcctgttatagctccaccttctgccatgaatatgagcttcctgaggcctcatcagaagctgagcaaatgctggtgccatgcttgtacagcctgaagaactgtgagccaaataaacctcttctctttacaaattaccctgtgtcaggtctttctttaaagcaatgcaaaatgggcaaatagagatagaggcctgatgtggtggctcacacctgtaataccagcactttgggaggtcaaggaaggagaattgattgaggcccagagttcaagaccagcctgggcaactgagtgagatcttgtctctacaagaaaactgaaaaaattagccaggcacagtggctctcacctgtggtcccagctactcaggaggctgaggcaggaggatcacttgaacctaggaactcaaggctgcagtgacctagtattgtgtcactgcactccagtctgggtgacaaagcaagacctcatctcttaaaatacatagatagatagatagatagatagataccacatatactgttacttgatcattaacattctatgcatgtaacaatattatgcataccccattaatatctacaatattatgtatcaattttaaaaaaatcttattggtattttcattgttattacattaaactggcttctatttttaccagaaaacgcacctttattctattgaaaattcccattcaatattttcatttatttaaattctgtttatatttgtccctcatgaggattttagagttaaaaaaaaatagtcattagttggagggatctggcaagatggccaaataggaacagctccggtctgcagctcccagcgagaccaatgcagaaagtgggtgctttctgcattctcaactgaggtaccttgttcatctcattgggactggttaggcaataggtgcagcccatggaaggtgagcagaagcagggtggggcgttaccttacctgagaactgaaaggggccagggacctccctcccccagccaggggaagctgtgagggactgtgctatctggcccagatactatgcttcttccacagtttttgcaatctgcagaccaggagattccctcacgtgcctacaccactagggccctgggcttcaagcacaaaactgggtggctgtttgggcagacactgagctagctgtaggagttttcataccacagtggtgcctggaaccccagagagacagaaccatacactcccctggaaagggggctgaagccagggagccaagttgtcttacttgatgggtcccactcccacagaacccagcaagctaagaaccactggcttgaaattctcactgtcaacacggaagtctgaagtcgaccttggatgatacagcttggtggggggaggggtgtctgccattactgaggcttgagtaggtgggtttcccctgaccctgctaaggactggcctgaactaaacacagtgaggcaaagtgactgtggtcagactgcctcgctagatcctcttcactaggtggggcatctctgaaagaaaggcagcagctccagtcagaggctggcttataaataaaaactcccatctccctgggacagagcacctgggtgaaggggcagctttggacacagcttcagtggacttaaacgttcctgcctgttggctctgacaagaggagtggatcctgacaaggaaggttctcccaacacagtgcttgagctctgttaagggacacactgcctcctcaagtgggtccctgacccccatgcctcctgactgggggaaacctcccaacagaggttgacagataccccatacagaagaactctggctagcatcaggccggtgcccctctgagacaaagcttccagaagaaggagcaggcagcaatctttgctgttccgcagcctttgctggtgatacccaggaaaatagggtctggggcggacctccagcatactgcagcagacctgcagaagaggggcctgttaaaagaaaaactaacaaacgaacacaataacatcaacatcaacaaaaaggacccccctacacagaaaccccatccaaaggtcagcaacctcaaagatcaaaggtagataaatccatgaagatggggagaaaccagcccaaaaatgctgaaaattccaaaaaccagaatgcctcttctccaaatgattggaacccctctccagcaagggcacaaaactggacagagaatgtgtttgacgaattgacagaagtaggcttcagaaagtgggtaataacaaactcctctgagataaaggagcatgttctaactagaataacaagtttagagaagaacataaatgacctgctggagctgaaaaacacagcacaagaacttccttaagcatacacaagtatcaacagctgaatcaatcaagcagaaaaaaggatatcagagattgaagatcaacttaatgaaataaagcatgaggacaagattagagaaaaaagaatgagaaggaatgaacaaaatctccaagaaacatgggactatgtgaaaagaccaaaccaacgattgactggggtccctgaaagtgatggggataatggaaccaagttggaaaacacacttcaggatattatccaggagaaattccccaacttagcaagacaggccaacattcaaattcaggaaatacagagaacagcactaagatactccttaagaagtgcaaccccaagacacataattgtcagattctccaaggttgaaacgaagaaaaaaatgttaagggcagccagagagaaaggttaggttacctacaaagggaagcccatcagactaacagcagatctgtctgcagaaacccttcaaaccagaagagggtggggcccaatattcaacattcttaaagaatttttaatccagaatttcatatccagccaagctaagtttcataagtgaaggagaaataaaatcctttgcaaacaagcaaatactgagcaattttgtcaccaccaggcctgccttacaagagctcctgaaggaagcactaaatatgaaaaagaaaaactggtaccagccactgcaaaaacaccaaaatataaagacaagtgacactataagaaactgcatcaactaacatgcaaaataaccagctagcatcatgatgacaggatcaaattcacacataacaatattgaccttaaatgtaaatgggctaaatgctccaattaaaagatacaaactggcaagttggtagagtcaagacccattggagtgtgtattcaggagactcatcttacatgcaaagacatatatagactcaaaataaagggaatgaggaatatttaccaagcaaatggaactcaaaaaaaaaagcaggagttgcaatcctagtctctgataatacagattttaaaccagcaaagataaaaaaagacaaagaagggcattacataatggtaaagggatcgatgcaacaagaagagctaactatcctaaatatatatgcacccaatacaggagcacccagattcataaagcaagttcttagagacctacaaagagacttagactcccacacaataataatgggagactttaatagcccactgtcaatattagatcaacaagacagaaaattaacaaggatattcaggacttgaactcagctctggaccaggcagacctaatagatatctacagaactctccaccccaaatcaacagcatatacattctactcagcaccacacagcacttactctaaagttgaccacataagtggaagtaaaacactcctcctcaacaaatggaaaagaacagaagtcataacaaacagcctctcaggacacagtacaatcaaattagaactcaggattaagaaactcactcaaaaccacacatctacatggaaactgaacaacctgctcctgaatgactaatgggtacataatgaaattaaggcagaaataacgaagttctttaaaaccaatgagaagaaagatacaactggctgggcacagtggctcacacctgtaatcccagcactttgggaggccaaggcagatcacgaggtcaggagattgagaccatcctggctaacactgtgaaagcctgtctctactaaaaatacaaaaaattagccgggtgtggtggcgggtgcctgtagtcccagctactgggagactgaggcaggagaatggcatgaacccgggaggcagagcttgcagtgagccgagatcactgccactgcactccagcctgggcaacagagtgagactctattctcaaaaaagaaagaaagaaagaaaaagagagagacgaaagaaagagagaaagaaagagagagagaaaaagaaataacataccagaatctctgggacacagctaacgcagtgtttagggggaaatttatagcactaaatgcccacatcagaaagcaagaaagatctaaaatcgacaccctaacatcacaattaaaataactagagaagcaagagaaagcaaattcaaaagctagcagaagacaaaaaataagtaatatactaccagaactgaaggaactagagacatgaaaaacccttcaaaaaatcaatgaatccaggagctgggtttttttttttttaagtttttatcatgtttatttaactacaggtataggatgaagatgcacttcaaatatcatgggaaattaaatattctgtgttggtctactcttttaaatttcagtgtacctcttcttaactaaagagaaatgtcttaaacctctttacactttacatccattttatgcatttagattcttctccagtatttcatttattcatttttttttattattatactttaagttttagggtacatgtgcacaacgtgcaggtttgttacatatgtatacatgtgccatattgttgtgctgcacccattaactcgtcatttagcattaggtgtatctcctaatgctatccctcccctctcccccaccccacaacagtccccagtatgtgatattccccttcctgtgtccatgtgttctcattgttcaattcccacctatgagtgagaacatgcggtgtttggttttttgtccttgtgatagtttgctgagaatgatggtttccagcttcatccatgtccctacaaaggacatgaactcatcattttttatggctgcatagtattccatggtgtatatgtgccacattttcttaatccagtctatcattgttggacatttgggttggttccaagtctttgctattgtgaatagtgccgcaataaacatacgtgtgcatgtgtccttatagcagcatgatttatagtcctttgggtatatacccagtaatgggatggctgggtcaaatggtatttctagttctagatccctgaggaatctccacaccgacttccacaatagttgaactagtttacagtcccaccaacagtgtaaaagtgttcctatttctccacatcctctccagtacctgttgtttcctgactttttaatgatggccattctaactggtgtgagatggtatctcattgtggttttgatttgcatttctctgatggccagtgatgatgaacattttttcatgtgtcttttggctgcataaatgtcttcttttgagaagtgtctgttcatatcctttgcccactttttgatggggttgtttgtttcttgtaaatttgtttgagttcattgtagattctggatattagccctttgtcagatgagtaggttgcaaaaattttctcccattttgtaggttgcctgttcactctgatggtagtttcttttgctgtgcagaagctctttagtttaattagatcccatttgtcaattttggcttttgttgccattgcttttggtgttttagacatgaagtccttgcccatgcctatgtcctgaatggtaatgcctaggttttcttctagggtttttatggctttaggtctaacatgtaagtctttaatccatcttgaattactttttgtataaggtgtaacgaagggatccagtttcagctttctacatatggctagccagttttcccagcacaatttattaaatagggaatcctttctctgctgcttctttttgtcaggtttgtcaaagatcagatagttgtagatatgcagcattatttctgaaggctctgttctgttccattggtctatatatctgttttggtaccagcaccatgctgttttggttactgtagccttgtagtttagtttgaagtcaggtagcgtgatgcctccagctttgttcttttggcttaggattgacttggcaatgcgggctcttttttggttccatatgaactttaaagtagttttttccaattctgtgaagaaagtcattggtagcttgatggggatggcattgaatctataaattaccttgggcagtatggccattttcacgatattgattcttcctacccatgagcatggaatgttgttccatttgtttgtatcctcttttatttcgttgagcagtgttttgtagttctccttgaagaggcccttcacgtcccttgtaagttggattcctaggtattttattctctttgaagcaattgtgaatgggagttcactcatgatttggctctctgtttttctgttattggtgtataggaatgcttgtgatttttgcacactgattttgtatcctgagactttgctgaagttgcttatcagcttaaggagattttgggctgagacgatggggttttctacatatacaatcatgtcatctgcaaacagggacaatttgacttcctctgttcctaattgaataccctttattcccttctcctgcctgattgccctggctagaacttccaacactatgttgaataggagtggtgagagaggacatccctgtcttgtgccagttttcaaagggaatgcttccagtttttgtccattcagtaggatattggctgtgggtttgtcatagatatctcttattattttgagatacgtcccatcaatacctaatttattgagagtttttttagcatgaagagttgttgaattttgtgaaaggccttttctgcatctattgagataatcatgtgttttttgtcttttgttctgtttatgtgctggattacgtttattgattttcgtatgtcgaaccagccttgcatctgagggatgaagcccacttgatcgtggtggataagctttttgatgtgctgctggatttgctttgccagtattttattgaggatttttgcatcaatgttcatcaaggatattggtctaaaattctcttttttggttgtgtctctgcacgactttggtatcaggatgatgctggcctcataaaatgagtcagggaggattccctctttttctattgattggaatagtttccgaaggaagggtaccagttcctccttttacctctggtagaattcggctgtgaatccatctggtcccggactctttttggttggtaagctattgattatttccacaatttcagagcctgttattggtctatttagagattcaacttcttcctggtttagtcttgggagggtgtatgtgttgaggaatttatccatttcttctagattttctagtttatttgcatagaggtgtttgtagtattctctgatggtagtttgtatttctgtgggatcggtggtgatatcccctttatcattttttattgtgtctatttgattcttctctctttttttctttattagtcttcctagcagtctatcaattttgttgatcatttcaaaaaaccagctcctggattcattaattttttgaagggttttttgtgtctctatttccttcagttctgctctgattttagttatttcttgccttctgctagcttttgaatgtgtttgctcttgcttttctagttcttttaactgtgatgttagcgtgtaaattttggatctttcctgctttctcttgtgggcatttagtgctataaatttccctctacacactgctttgaatgtgtcccagagattctggtatgttgtgtctttgttctcgttggtttcaaagaacatctttatttctgcctttattttgttatgtacccagtagtcattcaggagcaggttgtttagtttccatgtagttgagaggttttgagtgagtttcttaatcctgagttctagtttgattgcactgtggtctgagagacagtatgttataatttcggttcttttaaatttgctgaggagtgctttacttccaactatgtggtcaattttggaataggtgtggtgtggtgctgaaaaaaacgtatattctgttgatttggggtggagagttctgtagatgtctattaggtccgcttggtgcagagctgagttcaattcctggatatccttgttaactttctgtctcattgatctgtctaatgttgacagtagggtgtgaaagtctcccattgttattgtgtgggagtctaagtctctttgtaggtcactaaggacttgctttatgaatctgggtgctcctgtattgagtgcatatatatttaggatagttagttcttcttgttgagttgatccctttaccatatgtaatggccttctttgtctcttttgatctttgttggtttaaaatctgttttatctgagactaggattgcaacccctgcctttttttgttttccatttgcttggtagatcttcctccatctctttattttgagcctatgtgtgtctctgcatgtgagatgggtttcctgaatacagcacactgatggatcttgactctttatccaatttgccagtctgtgccttttaattggagcatttagcccatttacatttaaggttagtattgttatgtgtgaatttgatcctgtcattatgatgttagctggttattttgctcgttagttgatgcagtttcttcctagccttgatggtctttacaatttggcatgtttttgcagtggctggtacaagttgtccctttccatgtttagtgcttccttcaggagctcttgtagggcaggcctggtggtgacaaaatctctcagcatttgcttgtctgtaaagtattttatttctccttcacttatgaagcttagtttggctggatatgaaattctgggttgaaaattcttttctttaagaatgttgaatattggcccccactctcttctggcttgtagagtttctgccgagagatctgctgttagtctgatgggcttccctttgtgggtaacccgacctttctctctggctgcctttaatattttttccatcatttcgactttggtgaatctgacaattatgtgtcttggagttgctcttctggaggagtatctttgtggcgttctctgtatttcctgaatctgaatgttggcctgccttgctagattggggaagttctcctggataatatcccgcagagtgttttccaacttggttccattctcctcatcactttcaggtacaccagttagacatagatttggtcttttcacatagtcccatatttcttggaggatttgttcgtttctttttactcttttttctctaaacttcttttcatgcttcatttcattcatttcattttccatcactgataccctttcttccagttgatcacatcagttactgaggcttatgcattcatcacgtagttctcgtgctgtggttttcagctccatcaggtcctttaagcacttctctgcattgattattctagttatccattcgtctaatttgttttcaaagtttttaacttctttgcctttggtttgaacttcctcctttagctcagagtagtttgatcttctgaagccttcctctctcaactcatcaaagtcattctccgtccagctttgttctgttgctggtgtggagctgcattcctttggaggaggagaggtgctctgatttttagagtttccagtttttctgctctgttttttccccatctttgtggtctttgatgatggtgacgtacagatgggtttttggtgtggatgtcctttctctttgttagttttccttctaacagccaggaccctcagctgcaggtcattggagtttactggaggtccactccagaccctgtttgcctgggtgtcagcagtggtggctgcagaacagtggatattggtgaaccgcaaatgctgctgcctgatcgttcctctggaagttttgtctcagaggagtacctggccgtgtgaggtgtcagtccacccctactggggggtgcctcccagttaggctactcaggggtcagggacccacttgaggaggcagtctgcccattctcagatctcaagctgcatgctgggagaaccactactctcttcaaagctctcagatggggacatttaagtctgcagagtttattgctgtcttttgtttgtctgtgccctgcccccagaggtggagcctacagaggcaggcaggcctccttgagctgtgggctccacccagttcgaagttcccacccactttgtttacctactcaagcctgagcaatggtggacgcccctcccccagcctcgctgctgccttgcagtttgatctcagactgctgtgctagcaatgagcgaggctccatgggcgtaggaccctctgagccagatgcaggatataatctcctggtgtgccgtttgtgaagcccattggaaaagtgcagtattagggtgggagtgacccgattttccagatgctgtgtgtcacccctttctttgactgggaaagggaattccctgatcccttgcacttcccgggtgcggtgatgccttgccctgctttggctcacgcacagtgcatcacacccactgtctggcactcccctgtgagatgaacctggtacctcagtgggaaatgcagaaatcacccatcttctgcatcactcacgctgggagctgtagactggggctgttgctatttggccatcttggctccacccatggagctgggttttttttaaaagattaacaaaatagatagaccactagccagactaataaagaagaaaagagagaagaatcaaatagacacaataaaaaatgataaaggggacatcaccactgatcccacagaaatacaaactaccatcagagaatactataaacacttctatgcaaataaactagaaactctagaaaaaatggataaatttttggatgcatacaccctcccaagactaaaccaggaagaatttgaatccctgaatagaccaataataaattctgaaattgaggcagtaattaacagcctaccgacagcaacaaaaaaagcccaggactagatggattcacagccaaactctaccagagatacaaagaggagctggtaccattccttctgaaactattccaaacaatagaaaaagagggacttctccctaactcattttatgaggccagcatcatcctgattccaaaatctggcagagacacaccagaaaagaaaatttcaggccagtatccctgatgaacatcgatacgaaaatcctcaataaaatactggcaaactgaatccagcagcacatcaaaaagcttatccaccatgatcaagttggcttcatccctggaatgcaaggctggttcaacatacacaaatcaataaatgtaatccattacataaacagaaccaatgacaaaaaccacatgattatctcaatagatgcagaaaaggcctttgacaaaattcatgctaaaaactctcaataaactaggtattgatggaacatatctcaaaatgataagagcgatttatgacaaacccacagccaagttgaagttgcttatcagcttaaggagttttggggctaagatgataggcttttctaaatatacaatcatgtcttctgcaaatagagacaatttgacttcctctcttcccatttgaataccacttatttctttctcttgcctgattgctctggccagaacatccaatactatgttgactaggagtggtgagagagggcatccttgtcttgtgccggttttcaaaggtaatgcttccagtttttgcccattcagtgtgatactggcccctaaatctgtccctggaagctgctgacagatcaccatagggggcagaatgggagagagtggggcaaggataggagggccatctgtttcctccttcccactctcacctgtctggaagcacagctctctgatcaccagcaaggccagcacaagcagtgcccccttcatcgtgttgtctactggagtgttctgctcagggcagggcttctgctgctttataaacaaatgcccgtgggctgggacctggcacatgtgctttcctcacctgagaagtggtgcccacaggaagcccctcccactctgtggaaacaaagggctaaagatgttgatccagctgctgttgattctgctgctggtggctttggagagaagcagttgtaccttggccaaggagcaactgcagctgacctttctaagtggcaccattcagccccaaatgctctgttgtcccacccccaactgtcacctctgctttctggccacattcttcccccacctttcctggctccaaaagtagcactctcccaaaattaggagataaaaaccacagaaggtccaaggacaggtttatgccactgtaggtagccaaaataccatggagaaccttctttaggaaaacagtttcttggcacaaacaagatgagattgtctatgaaaattctagcagaaggaggcctgagaaagctccgaaggatcaaatgtggaacaatctgagcaatgaaataaatcacatagtatgggattataacccagagtataaaatagtataaaataacatacggttggccctttgtatgcgtgggtttcacatctgtaggctccacatctgttcattcaactgagcatagattgaaaatacttggggagtaggggagggaattccacacaatttcaaaaagcaaaacttgaatatatcccataccgagcgctatcttgaatccatgtgaaggaagttgtatgtgggcattgcattaggaattataagtaatctaggaatgacttaaaagtgtactggaggatgtgtgcaggttacatgcaaatactatgccattctatatacggaacttgtacacctgtggattttagtgtccatgggaggtcctggaaccaattccccataaatccaaagggacaactacatgtgagtctatactgataaaaataaatgattatgttctcactcataagtgggagctaagctatgatgatgcaaaggcataagaatgatacagtggatactggagactcaggggaaagggtggcagggaggtgagggataaaagactatacactgggtgcagtgtacaatgcttgggtgatgggtgcaccaaaatctcagaaatcaccactaaggaacttattcatgtaaacaaacaccacatgttccccaaaaacctattgaaataagaaaagaaacaaaaaaaacagggaagaaaaaaaatacaaataaatgattgaacaaataaataaatgagaaagaaaagacagatattccttacagaataattccaaattatatatatatagatcctcccctccctgctactgttttccccatttcctacttttttctttttcttttttagagacagggtcttcctctgtcacccaggctggaatgcaattgcgtgatcatagctcactgcagtctcaacctcccaggctctcaagcaatcctcctgcctcagcctcccaagtagctgggaccacagtccaccacactctgctaattttgttattttttaagagacagggtctcactatgttgcccaggctggccttgaactcctgggcccaagggatcctcctgcctctgcctcccaaagtgctggtattgtacacttgagccaccacacctggccaccctactcttgtcttcagaaacatctagccaccatcaagcttactgccctcccaccttgagtatgtgctggatgtttcccaagaaaatagtagggaaagggaaaaacagtagagaaagccaacacagatgacactaatcaagtgataagtgataaccagtgcctagacattgatgtcacagggtcctgcacttccagggtgtgttccctaaaatcctaatcccaatgtaaatattatgagaaaaaatgccaaactcagcttggtgggcatttgacgatgtccaccacctcaacactaccaaggccataaaaaagcaaggcaggactaagacagtgtcacacaccagaagacatgatgaacagctgacagctggagctcattgcttggcacctctcaaccaagagcccttaccagacatgaatcctgttttgtacaaggttctaatcaaggccaaaaaccttgcattctacctttgactctgcagcttcagcaaaccttattctgtcactactgactcagagaaaaggtcagccaagaacctctagccaaaaactgccttattctgaactgacaaagtactgaaaactttcactttatttaactaatacaaagcaatttaataagcaaatatacagtaagtatctgtaaaagttcttgttcatagactccagaggccaggcacagtgactcatgcctgatgagtgtctctcccagcactttgggaggctgaggtgggaggatcgcttgagtccagaagtttgagatgagcctgggcaagatggggaaaccccatctctacaaaaactaaaaataaaaaagttagccaggcttggttgtgcacacctgtggtccctgcgacttgggaggctaagatggatggcttgagcctgagaggttgaggctgcagtgagctctgattgcaccactgcaatccagcctgagcaacaggagactctgtcttaaaaaaataagaaaccaaaataagttttaaaaatatgtagtttatagactccagagcaatggggatgtcccttcaattcatctaacagacatttatagagcatctactttgtgttggtcctggtctgagccctgaggatgtagcagcacattggagctcctcatacatctatgggtagggggagataatcagcaaatggaaagacacaggccttttcctgccccactgtgagacctggcacaggtataaaagggcctcaaatggggcctgacgaacttgccactggcaccatgaagctggctcctactttcgggctgctcttcactgccgtgctcctgatctccagggcaagtaggtgccaggctgtgaatgcctggggatgtggatgctggggctttgatggcatccaagggcagttttgagcatacatggagggaaagggatgtgtaggctctgatgagtgtctctcaagggtctgtccacgtgtcattgtgttccagattgtgacatctgcccagttgtgacaaaggatgttgatctcttcctggtgggaacccctgatgaatatgttgatcatgtggcacaatactgaacatcctcattaatattgtccaatgctagaaagctgaagaactgtttcaatggcaaattggcagacgaggacaagaggcatgtgctcagtgggctggtgagtgcagctgtgtgtgcctgcaccttagtctgggtggagggtctgctggttctagggcagtgggtgggagtgcttattctcctcccaccaacttaccattatgatatgtaattgagactactggaaatagatttacatgtgaggtgtgtagcaacagtaaaatgtattttaataaaaggttataagaggcataaaaatataaattcttgcctagggttaaagaattgttttaaattagaaaatatgaagttaaaagttcaaacaagtggtagaaagtgtaaaaataaatcttgcaaaaattctatgtatgaatatattgactaaattcaaaagggtattatatggtttttctctaaattcagcattaaaataagagcatgacaaggtactctcccaccaaggcctttccctgggaatctgggaggaaaaggaacctcgtgaatgaggaggtagagaggagggagcagacaccaatgacgcagggaagggccaggaagggggattcagctagcccttgagcttgtgggctggctctggctgttcagctctgtaggctagcctgggaacctccaggacctcctgtgtccatggcaccactcaacctcaattttagacccttggctctgacctcctggcctacagcctctcgagcacatgagactctccaaaccatgagccctgggtctttctaatacaggatttattaagaaattatttttaggcagctagaaagggtaaaagttctcggtggaattttcctttaataaaaagcagccccaaaccatttcttctccgacagaaagcagcctgatatatatgaaaactaggagctttcatatgtaaatgccagcagcggtacctggaagccaggtacattgaatatggtggttcctgctctccttttccttgtcaccgtgtgtgtaggaatcatggtgacccaccaggtagaaccacatttgcataataaaagagtagggtgggaaggccagtctttttgcaggctatgcaaatggaacgtctagtcaaaccaatcccctgggccctatgtaaatcaatcaccacctccctaagcctctgcacaaaatcgattgcatcctgctgcaaactggagaccctctcttgggcgacctgctttctcagcatgaggaagccttttctctctcttcttcttctttgtctattaaactttctgctcctaaacccactcctcatgtgtattcgcgtcctgaatttttttcgactgagacaaagaaacagggtatataccccagtcaaccaagctgtttcatctggcggttctcatccaggatcaggatcagaatggaagatagaaacatcggactggtgagtatggagtgagcctcaaatctgccctttaatctcaaggctgtcttcaaaccagtttttttttttttttccacagagttcctagccatcacatgaggctgggagaagtcctagggcaactgagaatttctgtccagggcacaccctggcattattcaaaggcttcgggactgaacccagcctccaacagcccatccaagtgttgatcatggatctccagctatcctgtcacaaaattttcctttcttttctatctgctgtcactatgtctcctatcctctgtgtgtgcagtgtgcaggaaattttacagttcagggaaacagttctgttaggaaagatcagcaaacaccacgtgcagcaactcaacaagcatctctatcctgcctctggcgagcacatgttatttctaagccaacagcgccacctagtggaaatataaatcctcttcatgtggcaaatcgccggtgttttacagtaatactgcagcttctcaattctttctttttgcaccgctagaaatcagcctctaaggtctttctgtgaatgggaaagctccaacttcaacaattaggaggaaaatgtccttcacagccaaatgttagcgcccatactgtgccaacagcaggaaaaatcaccattaggtccctacgttcatttctgtctccaatgagagcagtacttaattagtaaagtgattttaagtacagaggttaaacagaaccattttgctatgggtaaatattttagcacaggccataatagcaggtaatttagcacactgactctgttaaagaaggcttgcccaaaggggacacagtctctccagagatccatttcttcaggaagccaggcagatcacacagatcgataagctaaggcagtgtgggtaaagcatggttaatcccataacttagttcataaggttccatgacttggaggaccacgcctacaacaatgggcagcacagttaacacaatgctgggacacaggaaccaaggagagaaaactgttggggggatgctcccactgtcttcctctccaccctaggtcacagtgaaaggacacctagggagtagaaacagagggacaaaagaactacagggcaaacaaaaatgttaacaaaatggcaatagtaaatggtaggagacttccacatgtcacatttaataatagacagaccatctagacagacaacgtataacagacttaaacaaaatcatagaacaaatggatctaccagacacacacagaactttcctcccaacagcggaagacattctcctcaagaatacacactacagtctccaggatagaagacaagttaattcgaaaacaagtcttaacaaatttaagatcagaaccatattcagtgtcttttctagccacggtggaatgaaaccagaaatcaaaactggcaagaaaacagggaagtttatatatatgtggaaaaattcaaaatttcttgacacaattgctgcacttctgatcaaatggctcttgcagatatttatagactatttcatccaacagctgcaaaatattatttctttccataagaacatttaacaaagaatgagtatttgataggaaaacaggatgactatagttaataatcatttaattgtatattttaaaataactgaaaaagtataatcagattatttgtaacacaaagaataaatccttcaggtgacggataccccattgactctttttcttttttttttttgacagagtctagcactgttgcctgggctggagtgcaatggtgcaatctcggctcactgcaacctccgcctcctgggttcaaatgatctcctgcctcagcctcccaagtagctgggattaaaaatacaaaaaataaaaatttttgtatttttagtagagacggggtttcactatgttggccaggctggtcttgaactcctaaccttgtgatctgcctgcattggcctcctgaagtgctgggattacaagtgtgagccaccacacccagcctcccgttgactcttatgtgattattatacatcgtttgcctgcatgaaaatatcacatcaagtatcatttctgaccacaatgaagtaacactataaatcaaatcaataacaagataaattttctaaaatgaacaaatatataaaaatgagacaatgagcaaataaacaaattaagaagcaaattaaaaaaatttttgaagcaagttaaaatagaaatgccacataccaaagcctgtgtgatccagcaaacacaatattagcaagaattttgataataaatatcttcatcaaaaatgtagaaaaagttcaaataaaacctgcacaacataacaaaatctatagggtactgaaaaggcaataataacaaggtagtttagtagtaactacctacatcaaaaaaaagagagaaagatttcaagtaaaacttaatgcatttcaaggaactaaaagagcaaatacaaaccaaacccaaatttagcaggaggaaagatataataaagatcacagcagaaataaatgaaattgagactaaaaaatagtatagaagattaacaaatgaagagttggttttgttaaaagaaaaaaaatcatcagaccattaactagattgtgaaaaaagacccaagtaaataaaaccagaaatgaaatagtagacatcacaactgataccacgcaaaaacgaagtatcattagagattgctaccagtaactataagctaacaaattagaaaacgtaccagaaatgtgtaaattattagacatataaaatttaccaagattgaaccaagaagaaatagaactcctgaatagagcaattacaagtaatgagattgaacctgtaataaaatgtctccatcaaagaaaaaacccaggctccattttcttccagaattgtacaaaatatttaagaactaataccaattcttcaaaaagtcctccagaaaattgaagggaatgaaattcttccaaactcattctacaaaaccagcaataccctgatggcaaaaccagacaaggacacacacacatacagaaaacaacaacaacaacaacaactataggccaatatccatcatcctcaacaaaattctagcaaaccaaccccaacagcacagcaaaatgatcattccccatgatcaagtgggagttctcccaggaatgcaaggatggttcaaaatacacaaatcaatacatgtgacacatcacatcaacagaaggaagaacaagaaccatacaatcatgtaaatagatgcagaaaaagcatctgataaaattcaactgtgcttcattataaaaactcttaacaaactgggtgtaaaaagaacgtatgccaatataataaatgaaatatatggcaaacccactgccaacatcatagtgaataaggaaatattgaaacgtcattctctaaaatctggaacaagaaaaaaaagtggccactttcaccagttttattcaacatagtactggaagtcctagccagagcagttaggcaacagaaagaaataaagtgcatccagactggataggaggatgtcccagtctctgcttgcagatgacatggtcttgtatatagaaaaacctaaaaggaccaacaaaaactcttagaactgataaagaaattcagtaaaggcacaggatacaaaatcaacatataaaaatcagtagcattcgtacacatcagcaacaaattagtaaaggaagaaattgagaaggcaaactcatgtaaaatagctaccaaaataagaataaatttaacgaaagaggtgaaagacctctacccaaaaagctataaaacgctgatgaaagaaagtgaagaggacatcaaaagtgaaaaggcatcccatgttcatgattggaacaattaatgttgtgaaaatgagcatatcaccaaaagtgatctgcagattcaatgcaatccctgtcaaaatatcaatgatatcttcacagaggtagaaaaaacaatcctaaaattggtaagaaaccacaaaagactcagaataaccaaagcaatcctcagaaaaatgaactaagttggaggcataacacttcttgaagtcaaaatagattatatagctatggttaaaacaaaaacaacacaacaacaaacagttgggcatggtggctcatgcctgtaatcccagctcttagggaggcagaggcgggaggataccttgaacccaggagttcgagacctgcctgggcaacatagtgaaaccctgtttgccacgaaaaggaaaacaaaagaaaaaaaaacagtatgatactgtcataaaaatagacacatagtcaatggaactaaatagcacagaaataagttcacatatttaccatcaacagattttcaacaaaagtgccaagaacatttattggggattggagagtcttttcaataagtggtgctgggaaaactggatattaatatgccaaaaatatgaaaccagacatccatctctaatcatatttttccttaaatcaactcaaaatagcttaaagacttatatgcaagagctgaaactataaaactactagaagaaaatatgcataaaaattttcaggacattggtcttggcaaagattttatggagaaaacccaaaagcacagacaacaaaagcaaaaatagacaaatgggattacattaaactaaaaagcttcagcacagcaaaggaaacaatcaatagagagaagagatgacttgcaggatggaaaaaaaaatatttgcaaactattcatctgacaagggattcatatccagaatatataaggaactcaaataactcaacatggaaaaacacacaaataatctgatgtacaaatggcaaattagctgaagaaatatctctcaaaagatggcatacaaatggtccaggtatttttccagtggtcagcatcaccaatcatcagggaaatgcaaatcaaaaccacaatgagattcatcttacctcagtgggaatggctattatcaaaattgcaaaagataacagatgctagtgaggaagcaaggaaaagggaaaccttgcgtactgttggtgaggatgtaaattaggatagccattatggagaatgatatggagatttctcaaaaaactaaaaacagaattaccacatggtcgagcaatacaattactgagtatacatccaaaaaaaagaaagaaaattagtatatcaaagacatatctgcactcttatatttattgaagtactattcacagccaagatttggaatcaatctcagtgtccatcaacaagtgaaaggatgaagaaaatacagtatatatatgcaatgaaatactgtttagccattaaaaaatcacaaagttctgttatttgcatcaacatggatgaatttggagccattgtgttaagtgaaataagccaggcacagaaagataaatgctgtatgttctcattcatacacggaagctaaaaaagttgaactcatagaaggagagtgattactgatacaaaatgcaactaactagataggaggaataagttctagggttctatagcactataggatgagtgtaattaacaatgtattgttaaagtactgataattctagtaatgttgtaggatacgaaatacacatacaaaaatcagagacatttctatacactgataatgaactatccaaaaaggaaaataagaaaacaattacatttgcagtaacaacaaaaagaataaaatgcttcaaaataaacttagccaaagaggtgaaatacttgcacactgaagactataagacattggtaaagaaaattaaagaagacatatatcagattctatgaatcccaatggcattttttatagaaacaggaaaataatcttaaaatgtttatagaatcgcaaagaagcccaaaaagtgaaaacaatcctgagtgagaagatgaagctggaggtatcaacctaaaaaatgagagaaaacatttgtaaaccatatatttgataaggggttaatatccaaactatataattacctgatacaactcaacgcaaaaaataatccaattaaaaatgggcaaagacctgtgtaggcatttttcctaaaaatacatacaaatggccaatagctgcatgaaaagatgttcaccatcacgaatcatcagggaaatgccaatcaaaaccacaagatgccatctcacacacattagcacggcttctaccgaaaagacaagaaattataagtgtttgcaaagatgtaaagaaattgaaacccttgtgcactattggtagaaatataaaatggtacagcctttatgaaaaacagaatggagctttctcaaaaaattaaaaataggctgggtgcattggctcacacctgtaatcccagcattttgggaggccgaggtgggcagatcagctgagatcaggagtttgagaccagcctggccaacatggtgaaactctgtctctactaaaaatgcaaaaattagccaggcatggtggtgtgtgtctgtaatcccagctgctcgggaggctgagacagaagaatcacttgaacccgggaggcaaagtttgcagtgagccaagatcacaccattgcactccagcctgggcgatagaacaagactctgtctcaaaaaaaaaaaaaaaaaaaaattaaaaatagaactactgtatgatccagaaatcccacttctatgtatatatccaaaaaaaataagatcagtgattggcaccccaaggttcattgtggcattattcacagtcaccaagatagggaaagaacctaaatgtctgtcaatggatgaatggataaagaaaatgtgatatatacaaaagctatctatctatctgtctattatctatctatctatctatctatctatctatctatctatctatctatctatgtatctatcatctgtgttttacaaaatatacaatggaatactattcagccttttaaaaaagagggaaatcctgctactttcaacaacatggatgaacctggaggacattagtgaaataagctagacgcagaaagacaaatcctgcatgatctcacttctatgtgaaatctaaaatgataaaactcatagaatcagagagtagaattgtagttgcctggggccacaaagtggtggtgggtgggatgagtgagaagttgtcagtcaaagggtacaaagtttcagctatgcaagatgcatgagctctggagatctaatgggcagcatggtgaccatgattaataatactgtattgtatagaagaatcccctttatcctcaggggatacattctataactctctgtgaatgcctgaacccatgcatagtactgaaccttctatacaatatactatgcttttttcctatgcgtccatacctatcatagagtttcgtttataaatccaactgagtaagaaattaacaggaactaattataaaatagaacaattataccaatatactgtagtaaaatttacatgaatctgatcagtgtctctctctgaaaatgtcttattgtactgcctcaccaatgtttggactctggttgactatgagtaactgaaactgcagaaagcaaaactgtgaaaaagggaggagccatcatacttgaaatttgctaaaaattgttatcttaagtgtcctcaccagcaaaaaaaaaaaaaaacaaaaaaaaaaaacctgttttctacccctcaaaaaatttcttctgctgttcctttgtactcaaataatctcctcacccttaatcattagtggccactggtgtgctcttatccctatagctttactttttccagaattgctaataagaaaaaccgtgcaatatgtagcctttgagtctggctgacttcaatacctttttgttttaaaattctaaatataatcaaatctatgatgaatatattaattaccttgagtatggtggtcacttcaccctgtaaatatatatcaaattataaagccatacattttaaatatacacaattcctatttgtcaattataccaataaagccagaggtaaaaaagaaatcttattatctagttactatataaaaatatattaaatatattgccacataaaaacctgattattttttattttttatttttttatctcttttttttattattattatactttaagttttagggtacatgtgcacaacgtgtaggtttgttacatatgtatacatgcgccatgttggtgtgctgcacccattaactcgtcatttagcattaggtatatctcctaatgctatccctcccccctccccctaccccacaacagtccccggtatgtgatgttccccttcctgtgtccatgtgaagaacctgatttttaaaaaataaattgggtaatcttatttccagcaattaaaacatctgaaaaaatgagtattaataaagatacttgatacctttagtattttaagattataggtagaatttgtcaatgaggaaattattgaaagaagccagactcaaaaagctacatagtacatgatttcattgataagcagttctggaaaaagcaaggccattggaatgaggaacaagctggtggccactcaggattaagggcaaggagaccacctgactacaaaagcacagcacaaggagcgtctgaagttaggaaacatctctactgttgtagaagtgcctacgactccagacacccgtacaaaacctacataagacagagttctcaaaactcacggaaatgcacatcaaaaagagtgagtttgctgtatgtaaattttttaacatttgaaactcaaaaaaaggtatgaagtattcatactcataagaccaatgaacctgaaagattataagttctgtgaaggaatcagatcaaaaacagtgcatgctctatgagtccatgtacatgaagtgctggaaaatgcaagctaatctatactgacagaaaccaaatcagtggttgcccagagagaaggaaggggacaaggagaggcaggagagaggcacttaaagaggcacaagaaaactttcacaagggataaatctgttcatattttgattgtggtgatgatttttctggttttcacaactgtcagaagttacaaattgtacattttagatatacatgcttcttatatgtcatttatacttcattaaagctgttaaaataaaaaaattaaataaacatatataagatttaaaaatacaattaggaaaaacttaatagaataaggcatgtaataatggaggaatatgcatttttaattgcatgtggatgattaataaaaatgaccacttattagaacataaagtagctctcaacaaatttcaaaggattttaaaatttccagaggatataatttgatctcaatgcaattttcatagaaatcaataacaaaaagtgattgcaaactcttcatatttatagaaattaatgattcaattggctcacttttactgtcacaaataacctgaaaattcaatagattaaaatgacaatcattgatgatgatgacaatcattgatccctcatgtgctgtgggttggctgtgtgatatcctaccttgttttaacctgaaattgactctcccttagctgagagagccggacagactccattttggctccttcacttgcagccccttacctagccccctttcttcaaggacttaacttgtgcaagctgactcccagcacatcaaagaatgcaattactgataagatactgtggcaagctatatccgcagttcccaggaattcacccggttgatagtacccaaagcccccgcgtctgtgtccggttgatggtacccaaagcccctgcgtctatcacctcatgatagatttaaagcccctgcacctggaactgtttttttttcctgtaaccatttatcctcttaacttttttgcctgttttgcttctgtaaaattgcttcagctaggctccccctcccctttccaaaccaaagtgtaaaagaaaatctagccccttcttcagggccaagagaattttgagcactagctgtctctcggtcgtcagcaataaaaggagtcctgaattagtctcagagtgtggcgtttctctacaactcgcctggttacaacatttggaggccccagtgagatttcaccactgggtgagtgctggactcgttctgggctacccccaacagatggcgggcttataggggaagcgcaacctgaagatgttccagcgccctgtaggccactgtcttctggaggggaatggatcgactgccagtgtatgcccaccaaattcaactcctgagtcctcagtctctggtcccaggaaggtgagtcagatctgactttgtttttctgggagggaaacagccgtgacgagggccctccctcagactctgtctacgttccaggatgctggaggacagagtcctggtttctgtctgtcttctctgttaagactagtctgtctgtctgtctgtctgtctctctctctccctctctctccccctctctctccctctgtctctctcccttctctttctctctctctctctcttttatctcttctccttctcttgttcaggtctctaggagacctctgttttagaacaggaataagaattgtaataaactctgtatgagtgagtgagtgaatgtggagttcaagggcttgcgcttgaatttccagtttgtagctccatggtgaaagctatggagtttgagtgggccctcacctgcagttccatggcgacctcataaggcttagggcagcatcaggcatagctcgatccgagctgggggtttacaccggcctgccaatgccaaaaggagcctaagtcctctcctggggagcggccaggcgggcatctgactgatcccatcatgggaccccctccccttgtctgtctataaaaattgctatactaatttatataccccagtgtctatttttctgtttggtctgtctaaatttcgtatgtcaggtcgccgatactgcccatggcgattggacaaggacttcttcaaagtcctcggtacagattttctatcctgggaggaaaaatctctcattagtcattttggctgcccatcccagtcctgccttttctgtcagaaacaaatcaggtgttgttatggggaggggtgtgagaaacattcgcccgtttgggatttctggcaccataaaggttgctggcatttggattgccataccccatgccccaatgactggaccacctcctccttagaccagtggtggattcaaaatagccaccccgcagacctccttgctcaccttttctgtcatcccataacttttcctgtgcccttggataaggcactgtgcggagaaacctgtgcccgtgctgctttactccgtctgcacccttattctattcctctgtggctactctcctaccttaggaaagatctgagtggcccctttcctcctcatccccatcccttacctcacatatcttgtttttctgtgtcacagccagtccagtgcctccaagagttggctctgctctccctcctaaaacccttaaaagaaaaggccaggtttgaactttttgccttcgaatcgtggagacaccaaaaatatttgggctataagtcaaagaggagagggggatcacataggtcccactggcctcggagccacctcttgtcctccccctagatctgaaagattaaagagacagaacttatgtggcaagaagtgttggctgtaattgatttcctacttcttctggttagaatacttttgttcttccgatattacagccccccaggccatgaatttctctgtccatgctgggtttaatatttctgctaaaaccttgttaaattgcctccagaatgggaaactcttcttcccggcctcataaagattggagccctctctaatgtatgttacaaaatttctccctgggcttctcagaggattatggggtccaccttaaaaaaggcaaactcctgacattctgtgaagtagaatggccacagtttggaaccgggtggcccccagaagggtcactgaatctcacagctgttcaggctgtgtggcgggtcgttgctggaactcccagtcaccccgatcagtttccctacattgatcaatggctgagcttggtctggagccctctcgcttggctccgctcatgtgccattcataatcttacctccaaggtccttttgagccaggcctcactgtcatcccaacccttggccccctcggctcctcctgtattgcctccttctgaagaagaggaaagtttttctcacgcatttctgctgccttataaccttcctgctccctcagaatcttccctagtctcctcgactacatctcctttgggctctccacctattgcctcctgattgcggctgcggcaggaggaggtagcccccctcctcctgctgagagaggcacaaatccctccgggtgatgagcgctcagctccattcttggtttatgtccctttctttacttctgacctgtacaactggaaggctcataatccccccttctctgaaaaaccccaggtcttgacctcattgatggagtccgtgctccagacccaccggcccacctgggatgactgttaacggctccttttaactctttcacctctggagagagggaacgtatccgaagagaagctaactgttacagtagctgcagtctctccaacaggtacaagacagcatccagctgcttgtccaaggagcacatcccaatgcagttcctgaccagatggggctctgccactctttccagctgggtgacctggagtatgttaaaaagttccagaaggaaggactcactcctgcctggaaaggacctcatactgtcatcctcaccacgccaacagctctgaaagtagacagcattccggctggattcatcactctcgcatcaagaagaccaacaaagcccagcaagaaacatgggtccccaagcctgggacaagccccttaaaactgcgcctaagttgagtgaagccattagattaattctttatctcttttgtttccacctgtcatgccctctgctccttcctactcttttctccttacttctttcacgacaggactgtgtttgcaaacaccacctggaaggcaggaacctctgaggaagtcttttttgcagtgatttatgtgctctgttcccagagcctgcccatactctcgaagagcaacacaatctgccgatcataggagcagggaacgttgaccttgctgcagggtttggacactccggaagccagacaggatgtgggagctccaaaggtgcagaaaaaggactccagaatgttgacttttacctctgtcctcgaaatcaccctaactctagttgttgagattcttaccagtttttctgccctgactggacatgtgtaactttggccacctactctgggggatcaacccgatcttcaaccctttccatagcttgtgcttcctgtcctaaactgtggactaagagaaattgtaatccccttactataactgttcataatcctaatttagctcaatggaattatggcatgtcttgggattaaggctttatatcccaggatttgatgttggaactatgttcaccatccaaaaaaaaaaaaatcctggtcccatggagccctcctaagccaatcgggcctttaactgatttaggtgaccctgtgttccaaaaatacccagacagtgtcaacttaactgtcccgccgcctttcctggttcctaaacctcagctgcaacaacaacacctccaacccagcctgatgtccattctgggcagggtacatcacctcctcaatctcacccagcctaaactagcctgagattgttggttgtgcctaaaggccaaacccccttattatgttggattaggagtagaagccatgcttaatattgactctctttcttgtcatacatgcccctgtgccctcacactaggagacgtgtccgggaatgcttcttgtctaattagcactggatataatttatctgcttctccctttcaggctacctgttatcagtctttacttacttccttaagcacctcagtctcctaccaggcacctaacaatacctggttagcctgcacttcaggtctcactcgctgcatcaatgggactgaaccaggacctctcttgtgtgtgttggttcatgtgctcccccaggtctacgtatacagtgggacagaaggacaacttctcatcactccccctgaattgcataccaggttttgccgagccgccctactccttgtacccctcctggccggcctaagcacagctgggttggtagccatcagcatggctgccttcattcagggagaaactggactaatgtccctatctcaacaagtagatgctgatttaagccatctccaatcaaccatagatatactccatacccaagtagagtctctagctaaagtagctcttcaaaaccgctgaggcttatatctgctatttgtctctcaaggagggttatgcacagctctgggagagagttgttgcttctgtgccagtcagtctggggtcataaaagatactctccaaaaagttcaagagaatctagatagacaccagcaggagcgggaaaataacacccccctggtaccaaagcatgtttaactggaatccatggctaactactctaatcactgggttagctggacccctcctcctcctcctattgttaggcttagtcttcgagccttgtatattaaattggtttcttaactttgtaaagcaatgcacagcttctgtcaagcttatgtatcttaaagcccaatataacccccttgttaaaactgagtaatcaatgatttgattcccccaaaacacaagtgggaaatgtgatatcctaccttgttttaacctgaaattgattctcccttagctgagagagcgggacagactccattttggctccttcacttgcagccccttacccaccccccttcctcaaggacttaacttgtgcaagctgactcccagcacatcaaagaatgcaattactgataagatactgtggcaagctatatccacagttcccaggaattcacctggttgatagtacccaaagcccccgtgtctgtgtctgttgatggtacctaaagcacctgtgtctatcaccctttgatagatttaaagcccttgcatctggaactatttttctttcctgtaaccatttgtccttttaacttttttgcctgttttacttctgtaaaattgcttcagctaggctccccctcccctttctaaaccaaagtataaaagaaaatctagccccttctttagggctgagagaattttgagcactagccatctctcggtcaccagcaataaaaggactcctgaattagtctcagagtgtggcgtttctctacaactcactcggttacaacagctggtgtttcagctgatataagctggtcttggctagatagtgaacactcaatctgtgggcctgataggacttgacccctcctgtaggttgggctcaaatctgatccacatctattcattcaggggctaacacctaagaaccagcacttctaggggaaaggtcttctcttagtgaccacaggaatgtgggaaggaaagactaactgcatggtcctattgaagcaattaactgcctattgtctgctaacatcccattgtccaaatctagggacagcaatggagtgaggggacttgggggactgcgcctgaactgggagggcagtgagtggagtatggacactgagtgactacatgattaggatcatgtagaagactgtgtggcaatttagcggcacaaagtaaatgttgtggaacattaacttaatctactaccaactgaaaaacttatggggagggagacattaaaaagaaaaatggaaaagacacaaataatgaataaattaaaaggataccaccttaaagatctttcagccattaaaataagagtatattcaggaggctgaggtgggagcattgcttgagcccaggaacttgaggctgcagtgagttatcatcacacctgtgaatagctcctgcactccagcctgggcaatatagtgagagtttatctgttaaaaataaagtaataaaacattttaaataggatactatggaaactttatgtttacttttaaaattaggtgagacttttaaattccaagaaaaacattcaaatactgacatgagaagatagagaaaccctgaatagtccttatgggtgaactgtgaacaggaggcctaggctctctcctatatgcaatcctaggaagatgatgttgcttttattttcctcctgcactgtttccttagaatggacttagatcaatgagaaatgctgcatttcaggcattgtttattgtgaaagctttgcctggggaactgcacctgaactgggaaggcagtgagtggcgtatggacactgaatgatgacatgattgggatcatgtaagagactgtcaggaaagcaaggttttcctaaactaacatggacatggaggtgtcctccaatttgtaagatgttctggatcagacagtgatacctgaacatttcaaggtgaacctcatgcacattaactttaattcccatatagctatgctactgaatggtggtgtgaaatgctagactgctgctgctggacatctctcaccccaccaataacactgaaaatactgatcatgctttttctttgtcctttcataaatctaagttaatttagagtcaagtgaatgcctattgtgttggtgagttttattgcccataagaatttgcaactgttgctggtggccatgcagtcttctaattgtctatgaaaccaaattaaaattttaaaagcttttgcaaagaaaatcccaggcagatgactttttctggaaagttctagcaaatacttaaggaggaaaccactccaatcttatacacattcttccaaagaataaataatgatggtaccttgtctgtatcggtcagtgttcctgcaggaaagaaatggcaaactcacactggacacctgaggagagtttaatgaatggctcttggctctggtgtgagcaaagtcaagggaagtcgataagaaaacccctggccggctgtggtggctcacgtctgtaatcccagcatttttggaggccgaggagggcagatcacctgaggtcaggagttcgagaccatattagtcagatatggtgaaatcctgtcctaaaaatacaaaaattagccgggcatgttggtgggcacctgtagtcccagctactcaggaggctgagacgggagaattgcttgaacccgggaggcggagattgcagtgaatcaagatcatgccactgcactcaagcctgggcgacagaggaagactctgtcaaaaaaaaaaaaatccaagtctagaaaaagcaaaatacccaaagggagacaaagaaaaagagctgttccaaggatgcagtgagacctgcaactgcaggagaggtcaagctcatgggacctttggccatcagtagagggaaacagccactgccaacctgcagccctaagggaagtcagctgggaacaaatcacttcatctcactctcttcttccttcccatatgtcctgccatatctccaatgtgtcaacacccccccaaaaaagggcaacgtagcccaatgatgcaatccagaaaaggccatgttctggtatacggaacaggttgcggaaagggtagactagatttcgcagaataaatggaaatcaccagtatactcctcagttcatttaatgaggctgctataatcctgacagtgaaatccaaccactcagggacatagacaaaattttccacacaagatattggcaaagtcaatgagattatatataaaataatactacatgctgattaaggcagatctataccagaaaagcaagccaggtttcatattaaaaaatcatttgatatactttaaaacattaacagaactaagaaaaaaaaacatatgcacatttcattaaacgtaaataagatgtattataatattcgtcatctttccttgtttaaaaaatgttctcaggccgggtgcggtggctcacacctgtaatcacagcacttttggaggccaaggtgggtggatcactggaggtcaggagttggagatcagcctggccaacatggtgaaatcccgcctctactgaaaatacaaaaattagccaggcgtggtggtgtgtgatggtagtcccagctactccacaggctgagaaaggagactcacttgaacccaggaggcacaggttggagtgagctgagatcgtgccactgcactccagcctaggagacagagagagactctgtctcaaaaaaaaaaaaaaaagaaattaaaaaaataaaatagaaatagaataatatatccttaatctaacaaagcatctaccaaaaattcctaaattaaacttcctatttaatggtgaaatatcaaaagctatccttttgaatccggatgaagcgtatccagaaaagaaggaaagaatagggcaaggaggaagagacaggagaggacagcggggaaaaggagggagtgtgagctgcacccgtgtaacctgcctgccccagctcctccacagccaggctgtcctccccacccaccccgcccctccaccatgggtctctctgctatgggaccactccccgctcagcaggctctcgagctccagcccctctccaggaaatctcatctcccaaaactctgcccagaactctaaagtgaagccagagttgagggagctcctcctccagtgtcaacctggctcccacctcccagtgtgggagaaaagcaaagcgggtgagctgggaggagtgcaggctttggggacaggccattctccaggtgtcagcctggccgcagggccaatggtgcctggcagagaaccacagggctcagtaagcagaggccacgcaagccctaaggtcagatttgagtaggagccagtgtggccaggtgggcaggggccctggttgaggtgaccagaaatcccatcagcaccactgggtctcttagaagatactcaagttcccaaaacaactgggggttagaggcaggggattagtcagacctcaccttggacagcagccccagccctgtctcagccccagggacaccagggcatggggctgtcacaaggaagctggctgaaggccaggtgcctgtgccttgactgagggacacggctcaggtcagtttgctccatgactcctgggaccctacagaccccactccgtgttctcctgcagcccagtgcacagcacgctgctctgctgtgccaggttgtgttgtgttgagttgtgctgtgtcatgtgctgtgtcactgttcctgcagactccctgtccgggagctctagggccctgacctctaagaagccccagccccgagccagcctcaggcaaggtctgcatccctgctgcctccgcttccctggctcagccttgaagctcccgctgacccctctgccactcaccaaccacccatcaccccctacttagaggccaggaagcagcaggggtcgtttcccccttctcttcaccctttctctcttccctccattctccaggacatacaactccaacagaaaccagaaatcctgcaaatgccctgacccacccaccaaccccagggcacctcctgcccaggtatttggcacaggggatgccctcacaccgaccccatcatgtgccctcgtggccccgaggctgtagcatgggatgcctgtctggccctggacctgccctgggccctgccctctgccaccgctcacaggacaaacccaaacaattgctgtcctccctctgaaatggtggtcatgggggtgcagggaaggcctcacgtccctcctgtgcccaggcccctcaccccaacactctggctggctgcatctgctgcccagagcccttggtcaccaggcgtgcagcctggaccacgctgatggcaagggaggcccttcctaagcctagaggtggtctaaaccttcatggaactgctggtcacagtgccagccagagtcccaggtgacgctgagatagctcaaagtggtgcatgggagatgtctgatatcaaccctctcctggaggtagatgatgtctccagcctggtgacttccctggcctccagccaccaccacccccagtgtccccaaggctgaaggtgcaagcttgccctggccctggtcctggcatagaaagtgcacgatctggtcatgtcatgcaggtgaggatacttgtgtgccaggtaacctcaggcaggcatggtggcgcttgtggggcaatcctgtaacctgcagtgtggtgggtgggatgggtgtgtgtgacacaggcaggaactactcctgatggcagctgacgacccacatgtgtactgggtgggtgccaatgggagtagcaggtgagtggctgagcacaggcaggtgaatgagtgacagctacacaaaccccaccactgagcacgtccctcccagggcaaagcagatcagatcacaggcccagccctgggaggcccagaggagcctcaggtcctcaggaaggctcctggccctcttcgccctaggaggaccccccccccgccccaagccggctccacctgtagctgtgggcgtgggagggagacagagcgctctggcggccagagaaggaaggaagatggagggagggcggacttctgctccctgacgctgctgctaggccccctgcggccctcctggagcccacacctttcagctgcagtctcccagccttcgtccccaggacgaagcccactaagccagtgcttttccactgcagctggctgttccgcttggggagggttcccagattgtgcaaagtgaggaagggtcccctgtccctgccccgcagggcccccactccaggcctcccccatctctccctgtctctctcagaggtagaggcagcattaaattaaaatttaattaaaatattaaaaataaagtaaaaaattcaaatatacaacagtagactgtctggcttgcatacaaagaaggccattgcccctttgggtgagccgggcaaggtcagggtctaagaagcgcctctggtgagaagcggttgtcaggctctgatggctgcgggaggagtgactcctcccaggatgagggtctgtgtcctctcagtgctcactcaagttccgtatttccaagtccttccagggggcgtaacgcacgtgagaactgccatttctgtcacagatacgtggccgcatgcatttccaggaaatgtccttggttcgcgaactacagctggcacaatccagcccagggcgttctgtgagctgtagtctccagcaagtgaattccaaaaaaacctcaaagacctcaaagaccatacagggtggacagcgtagtagcagggtttgggaagagaggagctcttttgctagcaaaggcgagagctcgcctggtacaaggtctgcccacgtcccgggagataaacattagtgtgagcgcacgctagacccagaagagtttgccacggccgcacggttttctgggaagtgtagtttcttggtcccggcgccattgtccttaaaagtagagggtggcccttggttccgaggtgtatctttcacctcatcagtatgactatatgccccaggacacttcccgcatggtcctaactgccgggctctgggacgacagccccaggcggtttagttttttaggaaaccgagatctgtttgcccgcggcgccccaggtccgcgcggccgcagagactcctgggaagtgtggtcttccggtacctgcggttcgttgcgcctggaattttgtcccctgcgcggatgattctgggaaatgtcgatcggctgtgggcggcgcactgggtccgccccgctgtagcctcaggcctgacggcgactcccaggctccgggacgattctgggcagtgtcgtccccagaggtcggcggccgttgcccgctcaccagcgacgcggggcgcctgcggggacggtgaggccctgctgaggactccggccagtatgagtcccgggggcggcggcggggctcaggccctgggtctgccccgcggtgtgaccccggccggtgccttggttttcctggccttcatgtcctcctatgtaaacgcggggtgatgacggcgccgacctcttggcgctgttgtgagagtgaagtgggcgcgtggttagacgccagccacagttgtctttgggttatgtcgtcatgaagccggcgctctacagttgtgtaaccttgaacaaatgggttcagtatcttggaatttcagttttgtcatcgtttaaaaaatagatctggaaaaatgtgaacgcacaccgtgcatagtggtgaagactgaacgagctgataaagtttttaccattgttttatgaggattttatttacagagtaattgattttcctcgcaggtggcacctggtaaatggttagcccttgcggagaaacaccctgttagttcccagggagagattggcgccctggagagtgattaccagtgtgcctttccattatggtgtgtcacaggtgccgcaagataagcctgatttttcatgactgctttttcctgcccttctgtgccctcaggacactgcccatctctaagataagagcctggaaagaggactctgttggctgttggaaattgcagagtaatgcctcaggtaggtcggtgtgtccgcaaatcttcctgaaacactttatcaggactgtgtgtttgctttgcttctcctgcctgttcccacctaaccaagtccatttaagggactggatccatggttcctttcagtataggaaggacggagcccacaggagagctccaaggtattatcctcctcacccagtgttcctcttttctacagttttctgctagaagactttctagtcttgccaacattttaaaactgtaattcacaatgcaactttggaatgtaaggttattcggtttatggttgtcaaaactgtaccatgtggtctcaagtgaagagatgcttgcagtcatccttgattcttccctttgacttatacctatattcagatcctctagttggagctaagctatacactgtatacagaatctgaccattagttaccccagcactaccaccaccactaccaccccggtagtgatagcaataaagccacctggattattgcggtagcctcctagctggattccctgcatctgcccttaaccctcatcagtctgttctcagtacagctgtgaccgtggtcctattgttacataaattcctgtcattcctcaacctataatttttcagtggctctaactgagtcacttctgcaatgacctatttgtacaattaggccattacctttctgatcccaccttccttctctgcctcctcattcctgtgagctctagccactgtcactagttgctgtgccatcgacgtggaatattcttcccccacatacgcacaaacttgcatccttatcttcttcgtgtgtttgttccgtggttactttctcagaaaagcttccctgaatggctatttgcaatcgcagtcaccttccctcgcctagcacttccactcctccatcactgctttgttgttttccacagtgtgtgtcactcactagctgatgtactgtatgttcagtatatgcacatgctcattgtctgttcctggtgggaggaatcttttttcttttttgttgtctgttatagcttcagtacccagagggttacctggcaccaaatagatgcttagtaagtaattgtggagtgaataagatgagtaatgacgaactggtggggcagaatcatggcatggaaggtgaagcttgcataggaggggatgtgagtagcagatgtacatgttgggtgaagtctgttttcttggagaagttagataattagaattgaaaaactggtgtggtggtacatgcctgtttttccagctattcgggagggtgatgagttgagaaaatttcttgaaccctgtggtgtgcggctgcagtg
